United States Patent Application Publication US 2019/0144922 A1 - sequence listing, part 11

SEQ ID NO: 4 - DNA, 5974109 bp, Klebsiella oxytoca (residues 3,982,741-5,974,109 of 5,974,109)
  misc_feature (5617061)..(5617061): n is a, c, g, or t
cgcgcgccgctcgtggaagagctgtaccgcttccgcgaccgcctggcggagaagctgcgctatctggccgatgcgccgcagcaggatccggaaggcaacaaaacgatggtgcgttttagccgcaaaactaagcagcagtacgttgcctcagagaaagacggcaaagccaccggctggtcagctttctatatagatggcaaatggactgaagcaaagaagtaactgctatcatctgataaaagggccgcgccgcggcccttttttgacatcacatgttgttgatatccaagatattactctgttcctcctctctccttataactgccttattattttttgttagtatctatacactgtagatataaatgatatagtggttatagctaatcccttttttattatcttatcgtcttatacatcaccgtcatcaggatacgttgtggcgccaacgcggcgagtcgcagggaggttcgggctagcccgtccaccgccaaatgacctgagcgtaaaatgtattaagcgggtttattttacgtgctatcggatatcagccatgaaactacagcagctccgctatatcgttgaggttgttaaccataatctgaacgtctcctccacggccgaaggcctgtacacctcacagccgggcatcagcaagcaggttcgcatgctggaggatgagctgggaattcagattttcgcccgcagcggcaaacatttgacccaggtcactcccgcaggccaggagatcatacgcatcgctcgcgaggtcctgtcgaaggtcgatgcgatcaaatcggtagcgggtgagcatacctggcctgataaggggtcgctgtacgtagcaactacccacacccaggcccgctacgcgctaccgggcgttatcaaaggctttatcgaacgctatccccgcgtctccttgcacatgcatcaggggtcgccaacgcaaatcgccgaggcggtgtcgaaaggcaatgctgacttcgctatcgcgaccgaagcgcttcatctttatgatgatttggtgatgctgccgtgctaccactggaaccgctccgtggtcgtcacgccagagcatccgctggcgtcgcgagagtcggtatcgattgaggagctggcgcagtatccgctggtgacttacaccttcggcttcaccggccgctccgagctggataccgcctttaatcgcgccggcttaacgccgcgcatcgttttcaccgccaccgacgccgatgtgattaaaacctacgtgcgtctgggccttggggtaggggtaattgccagtatggcggtggatccggtttccgatccggacctggtgaagctggacgccaatggtattttcagccacagcaccacgaaaataggtttccgtcgcagtaccttcttgcgaagctatatgtatgattttattcagcgatttgcgccgcatctgacccgggatgtggtcgataccgccgttgctttgcgctcaaatgaagatattgaagcgatgttcaaagatattaaattaccggaaaaataaccacagaaaaaataatggcatcctctcggggatgccaaagcctataatggcctgaaatggaatatctaaacctcgtctgaatcacaattttcgttaactcctcgtaccacatttgcaaatatacctgccgcgatcaaattaatgatgaaagatatctgctgaaaagcgaattcactggattaataggcaatccataattaagatttatctgtggttagtaattcttagcgattggtggtgaaaaaatgattagtgatatcgattatatgaagtttgcgatgtcacaggaacgtgacaagactgagatagatccagttttgagaagtaaggcctggagcgccgttatccttgggcttgcgatgttctggagcgtcattgctctggttgtctgcaacgtttggttactaagctagagcaccttccagtcacagcggttatgtcagttttatgacaagtgaattattgagaattatttctatctgataaaatagcggtaataaggaggatataatttttccctttttagactcgctcgataaattttctctattggactaatcgccggaataatggcgattagtctttctttgtactcgtgtactaatacgacgcgctcgccgacgcaaacctgacttcttcaatccttctcaatatatccgccctcattattcaaatttcctgtcttaatgcgttacgcctattttagcaatttgagttgttatcaaaatgttacatcaaagatgtgttatctttaataatgaccctgaggaggatcaggggatgctatccctaaggtaaaggaggagctatgtcgtcaaccctacgagcagccagtaaggatacgctccaggttaaagataaaacctggcattactacagcttaccgctggccgctaaacaactgggcgatctctcgcgcttgcccaaatcgctcaaagtgctactggaaaacctgctgcgctggcaggacggcgattccgtgaccgccgaagatattcatgccctggccggatggctgaagcatgcccatgccgacagggagattgcctaccgtccggcgcgcgtcctgatgcaggactttaccggggttcctgccgtggtggacctggcggcgatgcgcgaagcggtcaaacgcctgggcggcgataccgccaaagtgaacccgctttcgcccgtcgacctggtgattgaccactcggtcaccgtagaccgttttggtgacgatgatgcttttgaagagaacgtccggcttgagatggagcgcaaccatgagcgctacgtctttttgcgctgggggcagcaggcattcagccgcttcagcgtagtaccgccgggtaccggtatttgccaccaggtaaacctcgaataccttggccgggcggtgtggagcgaacagcaaaacggcgagtgggtggctttccccgacaccctggtcggcaccgattcccataccacgatgattaacggtttaggcgttctgggctggggcgtcggcggtatcgaagcggaagccgccatgctcggtcagccggtttccatgctgatcccggacgttgttggcttcaagctgagcggcaagctgcgtgaaggcattaccgcgacggacctggtcctgacggtcacccaaatgctgcgtaaacacggcgttgtgggtaagtttgttgaattctacggcgatggcctcgattctctgccgctggcggaccgcgcgacgattgccaatatgtccccggagtatggcgcgacctgcggctttttcccgatcgatgcggtaacgcttgactatatgcgcctgaccggccgcagcgaagagcaggtggcattggtagaagcctatgcgaaagcgcagggcatgtggcgtcagcctggagatgaaccggtattcaccagcacgctggcgctggatatgggaaccgttgaagccagcctggccgggccgaaacgcccgcaggatcgcgtagcgctcggcgatgtgccccaggcctttgccgccagcaccgagctggaagttaatcacgcgcagaaagataaacggccaatcgactacacgctgaacggacagcagtattcgctgcctgacggcgcggtggtgattgccgccattacctcctgtactaacacgtcgaatcccagcgtcctgatggccgccggcttgctggccaaaaaagccgttgagcgggggctgaaaccgcagccgtgggttaaagcgtcgctggctcccgggtcgaaggtcgtttccgactatctggcccacgcaaagctgacgccgtatcttgatgaactgggcttcaatctggtcggctatggctgtaccacctgtatcggtaactccggaccgctgccggacccgatcgagcgcgcaatcaagcagggcgatctgaccgtcggggctgtgctctccggcaaccgcaactttgaaggacgtattcatccgctggtaaaaaccaactggctggcgtcgccgccgctggtggtcgcctacgccctggcggggaatatgaatctcgacctgacccgtgagccgttagggacgggtaaagatggtcagccggtgtatctgaaggatatctggccgagcggaatcgaagtcgcgcaggcggttgagcaagtctcaacggagatgttccgtaaagagtacgccgaagtgtttgaagggacagccgagtggaaggcgattaaagtggatcgctctgatacctacgactggcaggatgattccacctacattcgcctgtcgccgttctttgatgagatgggcgttgagcctaaaccggtagaggatattcacggcgcgcgcattctggccatgttgggcgactcggttaccaccgaccatatctccccggcgggcagcattaaagccgacagccccgcgggccgttatctgcaaaatcacggcgtcgaacgcattgattttaactcctacggctcccgtcgcggcaaccatgaggtgatgatgcgcgggacgtttgccaatattcgtattcgtaacgaaatggtccccggcgtggagggggggatgacccgtcatcttccggatagtcaacctatcgctatttacgatgccgctatgctctacaaagcggagggcacgccgctggcggtgatcgcaggcaaagagtacggttccggctccagccgcgactgggcggctaaaggaccgcgtttgctcggcgtcagggtggtgattgccgagtctttcgagcgtatccaccgctccaacctgattggaatggggatcttaccgctggaattcccgcagggggtgacgcgtaaaacgctgggactgagcggcgaggagcggatagatatcagcaacctgcaggctctgcagcccggtatgacggtgccggtcacgctgacgcgcgcggatggtcggcaggaagtgattgattgccgctgccgcatcgataccgcgactgagctgacctactatcagaacgacggtattttgcactatgtgatccgcaatatgctgtaaacccgcgtctgatataaaaagggccagcacaggctggcccttcatttttcaacggaattacttgctcagcaggtgccccattttggcagccttagtatccagatagtgggcatttttcgggtttcgtcccacgatcagcggcacgcgttccacaatgttaattcccgcttcagtcaggatttcgaccttcttcgggttgttggtcaacaggcgtacctggtcgacgttgagcagcttaaacatatctgcgcacagcgtgaagtcgcgttcatcggcggcaaaacccagctgatggttggcttccacggtgtcatagccttgatcctgtaacgcgtaggcgcggattttgttcagcagaccgatattgcgcccttcctggcggtgatacagcagaatgccgcgcccctcttcggcaatatgcgacaacgccgcttccagttgaaatccgcaatcacagcgcaggctaaaaagggcgtcgcccgttaaacactcagagtgtacgcgagccagaaccggggattgccccgaaatatcgccaaataccagcgcgacgtgatcctgcccggttgccagttcttcaaaacccaccatgagaaaatcgccccatggggttggcagtttggcttctgccacacgtttaagctgcatgtgattctccagattctatcagcacctgactgtgcttctgtttgccgctattttgccacaatggcgcgacgttctcctaattgcgtcgggttacctgcgcgcaaagcgcacaaacgaactactttccgttatgatattgaggttaatgaataaggagatgagatgctgttgattgccagacgaaccgccgttggcgcggccctgttattaatcatgcctgctgcgatctggatttcgggctggaaatggcatcccgggctgtcggcagggacgatgaagctgctgtactgggtgaccgagacggtgacgcagccatggggcatcattacgcacgttatcttatgcgcctggtttctgtggtgcctgcgttttcgtctgcgagcggcgataatgctgttcctcattctggccgcagcgatactggttgggcagggaatgaagacgtggattaaaggccgcgttcaggagcctcgtccctttgtcatctggctggagcagacgcagcaggtgccggtcacgcaattctacgcgttgaaacgcaaagaacgcgctaaactggtgcatgagcagctggcgcaagagcagcaaatccccgaatttttgcgcaagcactggcaaaaagagaccggcttcgctttcccgtctggccatacgatgttcgctgccagctgggcgctgctcggcgttggtttgctgtggccgcggcgtcgctgggtcaccctggcgctgctgctaacgtgggcgacggcggtgatgggcagccgcctggcgctgggcatgcactggccgcaggatctgatcgtcgcaacgctgatttcctggctgctggtgaccctggcgacctggcttgcccaacggttctgcggcccgctatcgccgccgggagaagaggcgcaggatattaaaaaaagggcggcagcgccggaataatgttgatattacccctatcaggccgcatatcctgtactggtgtcatgcatttccatttcaccgctgcggcgaaaatggtactttatagggctgaacgcgggattttttcgcgcaacccacagaacgggaagtcatgtgaaatattttcttattttcttactggtgttagccatcttcgtcatttcagtgacgctgggcgcgcagaatgaccaggtggtcacgttcaactatctcctcgcgcagggtgagttccgtatttcgacgctgctggccgtgctttttgctgccggttttgctatcggctggctgatctgcggtcttttctggctgcgcgttcgcgtctctctggcgcgcgctgagcgtaaaattaagcgtctggagcatcagatcgcgccagccagcgctacgcctgcagaagccggtgttcctgcggtgaaggaataatcatttatgctggagttgttgtttctgcttttgcccgttgccgcagcgtatggctggtacatggggcgcagaagtgcacaacagtccaaacaggacgatgcgagccgtctgtcgcgtgactacgttacaggggtcaacttcctgctgagcaatcagcaggataaagccgtcgatctgttcctcgatatgctgaaagaagataccggcaccgtcgaagcccatctgacgctgggcaacctgttccgctcgcgcggtgaagttgaccgcgctatccgcatccaccagagcttaatggaaagcgcctcgctgacttacgaccagcgcctgctggcggttcagcagctggggcgcgattatatggccgccgggctctacgatcgggcggaggggatgttcaaacagctggtggatgaaacggattttcgcctgagcgccctgcagcagctgctgcaaatttatcaggcaaccagcgactggcagtcggcgatagaagtggccgagcgtctggttaagctggggaaagagaaacatcgcggcgaaatcgccaatttctggtgtgaactggcgctgcagcaaatggcgggcaacgatctggataaggcgatggcgctgctgaaaaaaggcgccgcggcggatcgcaacagcgctcgcgtctccatcatgatgggtcgggtatggatggagaagggcgactatgccaaggcggtagagagcctggagcgggtgattgagcaggataaagaactggtgggtgaaaccctggagatgctgcaaacctgttaccagcagttaggaaaaaccgacgagtgggaagcatttttgcgccgctgcgcggaggaaaataccggcgcgacggccgatctgatgctggcgcagatcctcgaacagcgggaaggggttgacgccgcgcaaaactacgtgactcgccagctggagcgccatccgacgatgcgcgttttccataagctcatcgattaccacattaatgaagccgaagaggggcgtgcgaaggagagcctgggcgtgctgcgccagatggtgggcgagcaggtccgcagcaagccgcgctaccgctgccagaaatgcggctttaccgcccatacgctgtactggcactgtccatcctgccggtcgtggtcaaccattaagcccattcgcggactcgacgggcagtaattttaaaaaaaagccgcactttagttacaacatacttatggattattatgtccgtctcctccggctacggcgattaaggcgtctggcagggagggaaatgcagcctgttattttcggcttatcgcaggtagaatgctgcccgtttaccttttttgcgccgaaccggcgctcatcaacaattaaggtccggtcatgacgtctactgctacatcttcttcccgcgttgtcacatcctctcccatcgtcgttgctctcgattatgataaccgtgataaagcgctggcgtttgtcgaccgtatcgacccgcgcgactgccggctcaaggttggtaaagagatgtttaccctgctggggccgcagtttgttcgcgacctgcaccagcgcggttttgagattttcctcgatctaaaatttcacgatatcccgaataccacggcgcgtgcggtcgccgcagcggcagagcttggcgtctggatggttaacgttcatgcctccggcggcgcgcgtatgatgaccgccgcacgtgaggccctgctgcctttcggaaaagatgcgccgctattaattgcggtaacggtgttaaccagcatggaagccagcgatctgcaggatctgggcattacgctatctccggcggaccacgccgcgaagctggcggcgctgacccagcgctgcgggctggatggcgttgtctgttcggcgcaggaggcggttcgctttaaacaagagctgggccaggcgttcaagctggtgacgcctggcattcgtccgcaaggtagcgacgcgggtgaccagcggcgcattatgacgccggaacaggcgcaggcggcgggggtagattacatggtgattggtcgtccggtaacgcagtctgccgatccggccgccaccctgcgcggtatcaacgcatcgttgaataagggggtatgatgagcgattccaacagtcgtctggtttattcaacggacagcggtcgtattgatgagcccaaagcggtacaggcgcgtccgaaaggggacggtatcgtacgtatccagcgccagaccagcgggcgcaaggggaagggcgtgtgtctgattagcggaatagatgaaagtgacgacgcgctggctaagctggctgccgagctgaaaaagaaatgcggctgcggcggggcggtaaaagatggcgtgattgaaattcagggcgataagcgtgacttgctcaaatcgcttctggaagccaaaggcatgaaggttaagctggctggcggttgattaataataaggccacgataaatatcgtggcctttatttttgtgctggtgtactggtcagcaaatataaactttcattttattgttcgtggttaatattatttacccacctggtggccgataatcccgccgactgccgcgccgccgagggtacccagggtgctgccgtccgttaataccgcaccgcccagtgcaccggcacctgcgccgatagcggtgttacggtcgcgtttagaccagttagaacaagcgctcagagacattgcaacagtgacggccagaaccacagcggccatttttttgttcattgaagtcatcattttttttctcctgaataatctattcatggatacaacttcccttaagcatagcttgttacgccagcccggggggtattccatgaagctttagttgcgcaggtgttgctctattcacgcaggtgatagttacttcctgttatatcgctaacattaattctactttctataaatttttcaggcaggtaaaaagtctgaattcagatgtcagaaaagtctcagaccagggcgatgccggggagagcccggcaaagcggcggtaaggcagaaataaggatcagggatggttaacgatatcgacggctaaaccgcactgggttaactggttgcgcacggcatcattgagattatcatcggtgataatgcggttgaagcgccctatcgggccgagcggatagggatgaaccacgttgaatttcgagctatcgctcagcacaatcgcttcacagcccttttcaagcaccgcgttgaccacgtcagcacgcatcatatcccgtccggtaaatccggtttcagcctgccagccgtcaatgccaataaaggccttgctgaagtggacctgctgaataaactggcgggttagcggacccaccatactttcactgcgcttttgatagatcccgcccagcaggatgacttctccgggcgtctctttcagcagatgcgcgatatagctgctgacggtgatgatagttatatcgccgcgctcggcaagcgtacgggcgagcagggcgttgcagctcccgttttcgataaataccgtttccccggacgaaacgagcgtagcggcccgcgcagccagctctcgcttaatggcgaagttggtcatcatgcgggtttccacatcttcactatccagcggaacggcgaagccgtgggtacgccgcaggtagctctgtttctcgagtgaattcagatcctggcgaatggtgacttcagagacaccggtcatcttcgcgagatcggccacgctcatacggcctttatcgatgaccatttgcaaaatactttgttgtcgggcgttcatagcaacttcgcagttaagggctatttgggcgcgatcggtcctggatggccgatggcgacgatgaagattatcaaatttcccacggcgctttaggctgaccgggtttattttcctgctcgtcgctggaaagcgcctgcagttcagctttcagaatttccagattatggattgcggagtgataatccccggcaaccagaatatccagcacggtatcgattcgttgggcgagcaggcgggcattcagatctgacatggcgttatcctggttacaaatgtgaataaaatcaatgatgctaaaaacggatgaaaaagagaagcgaaaaaaacgcacaaactaactcatctacaatgattcgtgggcaacgcgcagaaaaacaacgggaagggctaaaatgcggctccatataagggagccgcacaggtgaactatcaggcggctggacgcgcaatcacgctacgggtttccatgcgcacttcggcaatcgtgacgtcgataacatccgtgactttgtagacgacttcgcctttgatctgcacggtgccgttttcctggctgcacaccagttcatcgcgcacggcgtgaaggaacggcgccgggataaaggcaaccgcgccgttatcaaccagacgcacgcgcatgccgccgcggctgacatcgataatctcagctgcaaaacgggtagtggtgccggcctgcggattcagatagcgggcgtacagccagtctccaacatcgcgctccgccatgcggttgaggcgacggcgttcagccatttggatcgcaacgtcatcctgcgggcgggagatcgcttcccctttgataatcgctttcagcagacgatggttaatcatatcgccgtacttacggatcggggaagtccaggtcgcataggcctcaaggcccaggccgaagtgcgggcccggctcggtgctgatttccgcaaacgactggaagcgacgaatacggctatcgaggaaaccagacggctgcgcgtccagctcgcgacgcagcttgcagaagccttccagcgtcagcacttccaccgggtcaacgtgcacatcgtgagtcttcagtaaggccgcgagctgctcggtgttggccggatcgaaaccggtatggacgttataaacgccgaaaccgagtttgtcgcgcagcacgcgggcggcacagatgttggcggcaatcattgactcttcaacgatgcggttggcgatacgacgcggttcggcgacgatatccagcacttcacccttgtcgccaagcacaaagcggtaatccgggcggtccttgaataccagcgcgtggtttttacgccattcgctacgacgcaggcaggcctcctgcagcagcttaatttgctgggcgatagtctcgcttcccggctgccagccaccgttattttccagccagtcggaaacatcatcgtaggccagcttcgctttcgactcgatggtcgccgcgaagaactgaatatcatcttcgatggcgccgtcatccgcgaggatcatgcggcaggccagaaccgggcgaacctcgttggggcgcagagagcagaggtcgtccgagagctcgcgcggcagcatcggaatgttgaagcccggcagatagttggtaaaggcgcgaattttcgccgcgttgtccagcttgctgccttcggcaatccacgcggtcggatcggcgatagcgacggtcagatgcagcttgccgtcagcggtttgctcaacgtacagcgcatcgtccatatcttcggtgctggcgctgtcgatggtcacgaaagccagggccgttaaatcacggcgttccagaccttcatcaagcatctcggtcgccacgccgtccggcgcttctttttccagattatgacgcgccagggtgacccaccatggaacgaaatgatcgtcgccgtaggtaatgtactgggtgagctcagcgtagaaaccgcggtcgcctttcagcggatgacggcgcatttcggcaacggcccagtcaccctctttaaaatcatgctctacgccgcgcgcggcgcggcaaggaatggcatctttcagcagcggatggtcaggaacgatggaaagacgatcgtctttcttatgaactttgccgacaaaacgcgtcaggaacggctcaaccagttcttcaggctcagcgctttcgcgttccttttcagtattgaccacggcgataatacgatcgccatgcatcacttttttcatttgcggcggcggaatgaaatagcttttctgcgagtcgacttcgaggaagccaaatcctttttccgtccccttaacgaccccttcaacgcgcggagtctgggaatgcagttgctgtttaagctgcgctagcagcgggttgtcctgaaacataatttcgtattttcgtggctaaaagagcggctgacatttttacgcgaatatgcctgccgcagcaagcgctgtttcagcattttacgtctcctgacgtacattcccgagggcgattttcagccgattcatccaaccgcacagcccgcaccaggcgagtagatcgatagccgcgctacgggaaagcccgtaatcagtgaggggagttagctgggcggcgctgaagcggtcgggcgcacgggtcaaaagctgtacggattgtagaagctggcgttccattgacgggttgtctccccatggctggacgccggattcattaccacgcaaagcgtccgtgagatcggctaaatctggacatcgcgaggcccacgcgttaaagcagctgatgctgccattaatccgcgcagcgatcagcgccacctgcgcggcgaacggttgtcgatcgctgaggtgggtcagaagctgttcctgcagagccagaggaggttcctgagccgccagcagcggggcaagttcaaacaggcccggatgttttcgccagttcgctaaaagagactggcgctcatcgtcggcatagcgtaagtccgcgtcgtcaagtcctggctgccagtcactctccctcgcgacgaaaagcgcttccggggcatcttcctgctgcggcatgccggggatccagcgcaccgggtaacccagcgcggcatggaaggcggcgatagcgcgggcctggaagctgataaagccaataatctgattgataaggataatatcgcgactggtcaggccgacttcgtccagctggctgcgggcgagcgcgttgatcagcgaaggagagctcgcgagctgacgcgcatactgggtaatttgcgccagacgacggttgctctcacgcgaggagtccgggccgggaagcggcgccaggcgagcggcgtagtgattacacaggcgctgtacgccataaacctgggcgacggtcagcgccgtacttagccggtcataggcgctaaatgtctgtagacggttaaccgtcactgacgcgggaaagagggcatctgccagccgacgggcgggcgtaagccagcgcgcatgcgcctcgagcagctcccgggggagagtcagatcgagtagaaaacgatcttcgacatgggcggcttcagggacgagcggcaatacatccaccgggcagattgttgactgggtctcatgataccagtggtttttgccgttaacgcggcgttgctccatgggcgttccttgttcggtatgtggcaaaccgccgtttcgcggtcatgctatgcggaactatcctggcttaaccctggagcgggagaaaatattgatccgtgctaacaaatagcggattggaataacagaaggaaagcgcgggggaaatacccctcctcgcgggcgcgaggagggtaacgaacttatttcagttccagctcgttcatggcggcgatgctgaagccgccgtcaacgtgaacgacttcgccggagatgccggcagacaggtcggagcacaggaatgctgcgctgttgcccacgtcttcagtggtgacggtgcgacggatcggggtgaccgcttcgcagtgcgccagcatcttacggaaatctttaataccggaagccgccagggtacggatcggaccggcagagatggcgttaacgcgaacgccttccgggcccatggcgttcgccatgtagcgcacgttagcttcaagagaggctttcgccagacccatcacgttgtagttcgggatggcgcgctctgcgcccaggtaggagagcgtcagcagggcggagcccgggttcagcataccgcggcaggctttcgccatcgccacaaagctgtaggcgctgatatcgtgagcgattttgaaaccttcacgagtgaccgcgttaacgtagtcgccgtccagctggtctgccggcgcaaagccgatagagtggacgaaaccgtcgaacttcggccacacttttgccagctcggtgaacagagactcgatgctctcatcttccgcgacatcgcacggcaggacgatattagagcccagcgcggcggcaaattcttccacacgacctttcagtttttcgttctgataggtgaacgccagttcagccccttcacggtgcatggcttgcgcgatgccgtaggcgatggacagtttgctggcaaggccagtcaacagaatgcgcttaccggaaagaaaacccatagcttttaatccttatcgttattgcgtatttttactttaacaatcatttggttagcattgttatttcgaaataactcaaatttagccgggaattatatcccactgacgaccccttgtgtcacgatatttttctgccattcgccacgtcatatcgcgctttggctaccgtgtatacaagagtataccatcggatatgacggcgacctggcgctagcgccgtgcaatttacgcctcggtttatttaccgtctttacgccaggcatcggcagtcagcgcctcgccgaaatggccggcaatcaggcgttttgtcagctcgtgcagcggagacgccagaacgtcggcggtgctgccgcgttcgaccacttcgccctgatgcatcaccagcacctgatcgctgatgtgcttcatcatgcccagatgctgagtcacgtaaatgtaggagataccctgtttttcctgcagctccagcatcaggtttatcagctgcgagcgcattgacatatccagcgacgccagcgcttcatcgcagacgatgaccttcggacgcaggatcagcgcgcgcgccaggcccagacgctgtttctgtcccggcgccagcatatgcgggtagtagctgacgtggtccggcagcaggccaaccattcgcaacgtttcgataatctgcttctgccgcgcttcgggttcgaggtcggtattcaggcgcagcggaaaatcgaggatttgcgaaatacgctgccgaggattgagcgaggtcgacggatcctgaaagatcatgcgaatcttctggctgcggaaagagtaatcgccaaacgccagcgggcgatcgtcaatcagcagttcgccggtgctgggttcgaccattccggcgagcatttttgccagcgttgacttgccagagccgttctcgccgataatcgccagcgtctggcgctcgcgcagggtaaagcttaacggcttaaccgcttccaccgtttgccgatgaaaccagccggtgcggtagcgaaaggtcttactcagattgcgcacttcaagcaatgtttcgaccatttcactctttctccatgttcagcgggaaatgacaggcatagaggtggttacgggcgcccaccagccggggcgtttcgatacattcgcgctgggcataggggcagcgcggcccgagccggcagccgatgggcagctgttcgagcaaagggatcgcccccggcaaggtgttgagccgactcttgtgcggcatggcgctgccgaaatcgggaatcgcccgaatcagcgcctgcgtgtaagggtgatgaggaatcgtcaccagctcttcgctcggcgcggtttccaccgtctgcccgcagtacatcacgttgattttgtccgcccatttactgagcatctgcatatcgtggctgatcagcaaaatagtggtgttgttgttttggttcagccgcgtcagcaggcggatgatttgcgcctgcgttgtcggctccatggcgttagtcggctcatcggcgatcagcagccgcggctggttagccagcgcgatggcgatcatgaccttctggcactctccgtccgtcagctcgtaggggaagctgcgcatcgcatctttatgatctttgatcccgacgcggtgcaggagctcgatggcgcgccgcttgcgccagcccaggcgctgccaccagcgtcctttaaaggtccagccggggatattctgcgttaattgctggccgatccgttcggaagggtcgagacaggattgcggctcctgaaaaatcattgagacgttgtggcccaccagcttacgccgctcgcgcaccgacagacgcagcaggtcgatgtcgtcgaagcgcatgcggtcggcggttacccgccagttgtccttggtgacgccgcatatcgctttagctattaagcttttgccggagccggactccccgacgaggccgcgtatttccccctcggcgagtgtcaggctgacgcgatcgacggcttttacccagccttcgttggtcttgaattcaatggttaaattacggatgtcgagtaacggcattattccaccccggcgatgatggcgcggcggatcccgtcgcccagcagattaaccagcaggacgcttatcatgattgccgcacccggcagcatcaccgtccacggcgccacgtaaatcagctccagcgcgtcgccgagcatcgctccccattcgggggaaggcagttgagcgccgagatcgaggaagcccagcgcagcgatatccaggatcgccatcgacagcgcgcgggtgatctcggtgacaaggcctgaggtaatattcggcagcaccgcgaaccataaaatattcagcgtcgaggccccgtcaaggcgggcggcgataacgtactctttttccagttcgtcatgcaccatgctgtagaccgaacgcaccatccgcggcagaagcgccagccagacggcgaacatcgcgtggctgaggtgcggcccggcgaaggcgaccacgataatggccagcagcagggacgggatcgacagcagcgtgtcaagaatatggttcatcaccgccgaccgcaggccgtgggtagaaccggcaatcacgccaagcaccagtcccagcagggcggcgcccagcgtcaccacaaacgcgccgccgaccgtcggcgccgcgccgctcagcaggcggctcaggacgtcgcgaccgagatcgtcggtaccgagaaagaacgacacttcgccgtaccgcgaccaggacggcggcagcagctggtagccgagaaactgctggtcgatgccgtaaggagcgaaccagccgccgaaaacgcacagcagcgccagcgccgcacagccgtacaggccgatcatggcggtcgtatcgccgtagaattttcgccatacggtgcgcagcgcacccggcgggcgcttctccagatagacgctatcgtagggcataccattccttatgtttcagtgggttagccatagcacccagaatatcggatatcacgttcacaataattaccagcgcgccgatgaccatcacgcccgcggaaatcgcggcgtagtcctgttggcgaatcgcgttaatcagccagcggcccagccccggccagctaaagaccatttcggtaatcatcgccagcgttagcatggtggaaaactggagtcccaggcgcgggatcaccggcggcagggcgttgtgcaggacgtggcggtgtaaaatcgtccgccgcgatacgccgcgggtggcggcggctttgacatagttggtgtcgtatacttcgctggtgctgatacgcatcaaacggatcacttccgtcgtcggcgctaccgccagggttagcaccggcagcaccatgtggcgcgccgcgctgacgatcatttcatggcgccacggggagtcggatagccatgcgtcgatcagcgcaaagccggtgaccgatttcacttcatacagcagatcgaagcgcccggagaccggaaaccagcccagggtaagggagaaaaacagggtcagcagcagcgccagccagaagacgggaatcgaaaagcccagcagcgccagggcgctgatcagggtatcttgccatttgttgcgcataatgcccgccagcataccgacggggatcccgatcaccagcgcgaagccgaaggcgaggatacagagctccatggtggcgggaaagacctctttaagctgctcggaaatcagctgaccgttgatgctggaaacgccgaaatcccagtgcagcacgccctcaaaccagaatagccaggcgttccacagcgaggcgccctgcagcggcgcgtggggcgtaaaatagctcaggctaaaaccgacaaaggtcagcaggaagagggtaatcagcagcagcagcaggcgacgcagggtaaaaataatcatggttttttcacctcgtcttctttttcccgcgagacgcctgcgaatgaggcgttgccaaacgggctcagcaccaggcctttcatgtcgtaacgataggcttgcaagcgcagggaggaggccagcggcagcaccggcagttcattggcaagaatgcgctgcgcctctttataggcctcaatgcgcgaggccagctgctgggaagtgagcgccttttgcagcacctcgtcgaattcgcgatgacaccagtgagcatagttggtttgtgaggtaatcgccgcgcagctcaatagcggacggaaaaaactgtccggatcgttactgtccgttgcccagccggacagcgtcaggtcatgactcatatccattaatctggcctcctggaaccggccttcgaccggcacaataatcaccttcacgccaatttgcgccatatccgcctgaataagctcggcggttttcagagggctggggttccaggcctgcgagctggttggcacccacagcttaagcgtgagattttccagccccagggctttcagccgggcgcgggcttccgtggggttatattcggtgatcctggcgtcgttatcgtaggcccaggaggcgcgaggcagcatagacgcggcggtttccgccgtgccgtagtagatcgactgcatcaggcgctgattattgatggccagcgccagcgcatggcgtacctcaggattatcgagcggcggcttagcggtgttaaacgccagccaggcgatgttcattcccgggcgcagggtcaggcgcagacgcgggtcgtcacgcagaatagagagctggcttgcggcgggccaggccagcacgtcgcactcgccggtcagcagttttgacaagcggccggtgccgccggagccgagatcgaccaccacctgcggcatcagcggtttaccgcgccagtaggccggatggcgctgcaggcgaatgtactgaccgctgcgatactcctccagctggaacggaccggtgccgaccggttgccggtcgatcagttcctggcgatcgttctgcgccagcttcgcggcatactctgccgacatcaccgaggcgtagtgggtggccaggtgccacaggaacgaggcgtccgggcgtttgaggcgaaactcgacggtatgactatccagcttacgcacgctttccacgctgtcggcaaactgtaagctatcgaaatagggaaagctgctgccgttaacgttgtgccacgggtggtcgcgattaaaaatgcggccaaaggtgaaaatgacgtcatcggcattaaaattacgggtcggtttgaaccaggcggtggtctgaaaaggcacgttgttgcgcaggtggaagcggtaggttgcgccgttgtccagcacctcccagctttctgccagttcgggaaccaggcgataagtatagggatcgacgtcaagcaaccggtcgtagagctgggcggccagggtatcgacaatcaggccgctgctgaccttttgcgggttgaaggtgttgacctgaccgctcacgcaataaacgaagccgctatcgcgaatatccgcgtgcgcaggcagcgctggcgcggcaaaagcttgcccgtacagcatacataccgctgccaggagagaagacaatttcaggcgcatagtttctttttgattatagagcaaggctctatcttattaatattaaataacatttaccaccaccttattgctcatggagataatataagcgagggctgcgtcggttatttgaccaactgattcaaattcataccgcttattaacttcgagtatacctcgtaaatcatccgacgtttgtcatcaggcaagcgaggggttgagcaaagcgtattttcgattcatctgccgcacggcttgagcaagctatgggtattgagcatggcgcttatttgcgtcgaagccccgatatccgccacatggtatctttttattggcggtttctccagccagccgtggctgtaaggctggctggcggtcgaggcgctacaggggaaggagccggttatagcgggcgatataatctttgggattaatttccagcttttcgccatcgtgatggtgggcaacataagtacgcagtaccaggccgctgttttgcggcgtaattgtccagccctgttgacgatatgcatcttcggttgagcggataagcaggtccgaaaagatcatcatgaccgagagcgccggcgcgcggtggcttttcatggtatggaccaggctgacgtgcgccgcatagcggccgagcgttgaagggttaaccggaatcatctttattttcagtccattgagtcataatgcgctgatgatagttcacatgaagatatcttgctagttacaattttttaaccgcaggtgaacgggctgccgcgcaagcaaaagctatttttcacggcacaggccgcttgcagaaagaagcagggtagtgacgctgtcacttttcaatcgccgagcggcgtgaattcataaagcgccagcgcattgctctccagcgaatcgacaagctgccagcggtcgctatccggcgtctcttcactgacgcgcagcgccggacgcgctctgtgcatcagccagcgatagtcctcatcgtccgggccgctttggctgcgaaaggcctcaaacagcgggaagagcgcgccatggtgccgatcgaacagatgatgtttgattcgccagcgtccttcaaggccgagcaggcgcacgctccagggctgactaaagcgctggataaacgcctcctcgctggaaagccagggattgaaaaccaccgtgttgcgcagcagtagctgataatggccgttatggcgcagcagcagcaagttcttgtcgttgatcaccacctcgccccgcagcctgcgccacagccatagcacccagtagaccggtcgcggcagaccgtggagatagtgcagcgccaggctggaagtgtccagcttgccgttggcgcgggcttccccctgcagccctgaattcagccagaaccccgcgagccaaacctgatccgccagtcccagcagattatccatcagcagcgcgccgcgaaagaaacggccgttggtatcgcgggtatcgccggtgagggtattccacgagagcagccaaagcggcagcaggagctgccgctggcgcagcgcgctatgaagtttgcgcaatttgtgtaccggatagttttcgctggcggccagtttctggctatccacctgcgcgagatccagcagttcattagcatcggcctggcaggccagaaaatccgcctcgaccagcagcggtgaacgcagaaggggatcgttctccacctgttgagggaaacggtgccagatccccagcgccgactgcggcgatagcctctgcaggatcgtcttttgttgccgccaggcgtgctggcgggcctcgtcgctggcctgaggggaccagtgccagacgaagtgccagctggcgagggttgccggcggaaaatggttagcggacagagagaggaaacgttgcagcaggtcgccgcgggtggtgagcccggtatgcagtatcaccgcccagccaagggtcgccagccagctaaaaatgcgctgcaggttataccagcaggcatacccggccatttgcggatcgtcccagccggtgccgaacaggcggctgctgagaaacggatcgtgaatatcgatggcgaatatcggcagcttgtcgtgcagctgttccagttcgcggcggacatcctcgcgcagcaggtcgtccagttcgcgaacggtaatcaccattcgggtgtgacgcagcggcgcggcgcgcgccgggagttcgcgaacatcgagatggcgggtttgttgggggctgagccgcagcggcgggctatccagaccgtaggtttgcggcgcgttgagccgggcgtacagccgatcgattgacaccggctgccatcgctcggtctgctgtgggggcggacggcgagattcgaccgccgtctgcgggtgctgctggcggaactggcgcggcgtcaggccgtgctcgcgtttaaacaggtcgctcatcacccggctgctggcaaagccctgctgctgagcgatctgctgtatcgattgacgcgtcgtcgtcagctgctccgcggcttcgcgcaggcgcagcccggtgatgtactgcataaagctgacgcccacctctttgcggaacagacgcgagagccaggcctcagaaacaaactccgcggcggctatctcctgcagcgacaggcgccgttgatagttggcgtcgattcgcgctaccactctgttaattcgctggctccagcgttcggctccgcgaggcgcctgggcggtgaggggacggctgaagcgtgacgccagcaggagagcaatttcgctaagccagcggttggcctccagccggtagtgggcctgcggattgaccagaccgaggaccagcagctggcgcatcaggtagcgcagggtgtcttcggcatcgcgcgtttcgctgctgctctggtagacggaggcaaaaaaatcgccgtcgaggcgggtcagccatccggcgttcagcgacagcgccatcacgacgttcgccgtcttgctgtgcaggctccagcggcgatgacgattcactatcgccagttcatcggcctgcaggtaccgacccgtctcgccatcgcggagttcgacgctgccctcaagcagccatagcagcgtcagagcatcgttttcctgctggctcagctgccggatatcgcgaaccacaacctgaaagtcgcctgaatgatgctccaccgtcgcctcctgaagacaaaaaacagcacgtcattttttgtcataaccgttttgtatgaaaaacactcattaataatccgtcactataaaacaaaaaagcgcattttaaagccgacagggatgcataaactcgaaagtgtcgtgcaaacacaacacaggaataataaaaatgacacacccgattattgaggcattacaggttaacgaggcgcagtttgtcgcgcttcgccgccgtttccatcagcagccggaaattggttttgaagagcataaaaccagcgaagaggttgcccgcctgctcggcgaatggggctatcaggttcaccgcggtctggcgggcaccggcgtggtcggtactttacgcgtcggcgagggtaaaaaacggttggggctacgggcggatatggacgcgctgccgatgcaggagatgagcggcaaagcgtgggccagccgggtcgacggtcgttttcacggctgcggccacgacggccataccaccacgctattgtacgccgcggaatatctggcgcgcacccggcagtttaacggcaccctgcagcttatttttcagcctgctgaggagttgctctacggcggtcgggtcatgctggaagacggcctgtttgaccagttcccctgcgatgccatttttggcctgcataatatgccggggcagccgttaggcagaatcggcctgcgcgatggggcgatgatggcctcctcggatactctccatattgaagtcaaaggggtgggcggacacggcgcggtaccggagcataccgtcgacgccacgctggttgcctgtcatatcaccctggcgctgcaatccattgtttcccgaaacatcacgccgtttgaaccagcggtcgtgaccgtgggcagtattcaggccgggcacgccccgaacattatcaacgacaaggtgttaatgaagctcacggtgcgcaccttaaacgaacaggttcgcgagaccgtcctgcagcgcattcacgatatcgccgttgctcaggccgagagctttaacgccagcgccgccttatcccacgttaacggcagcccggttttaaggaacgatccggctgccaatgagatggtccgcacggtggcgaccgcgctgtttggcgcggcgcaggtcggcgaggtgaagccgtttatgggcagcgaagattttgcttttatgctcgagcgtaatccgaacggctgctatttcaccatcggggccggggacgaagcggatcgctgcatggtgcataacccgggatacgacttcaacgatgcgctgttgctgaaaggcgccgcgctgtggtgcgccctgacggaacactatttgcgttaatgtccgcaacgaagaggaccctgctatgagttctgtatcgctaagcgaagcgcagttcgtcggcaccgatcgtctgctggcgggtattgtattgagcgttctgaccttctggctgtttgcccagtcggtgattaacgtggttccggcgatgaagagcagcctcgatatttcgctggaaaccctgaccctggcggtgagcctgagcgccttattcagcggctgcttcgtggtcgccagcggcgggctggcggataaattcggccgcatgcgcatgactaccctgggcctgatcctcagcattgtcggtagcgcaatgctggtgttctctcagggacccgcgctgttcctggccgggcgcgttttacaggggctgtcggccgcctgcatcatgccggcgacgctggcgttaattaaaacctggtatgaaggcaaagcgcgccagcgggcggtcagcttctgggtcatcggctcgtggggcggcagcggtctgtgctcgtttgtcggcggggcgatcgccaccggtctgggctggcgctggatctttgttttctccatcgcggtagcgctggcggcgctgtttttgctgcgcggtacgccggaaagccgcagcgccagcgcgcagcagcataagctggatatcagcggcctgctcagcctgatccttgcgctggtgctgctaaatctgtttatcagcaaaggccacggctggggctggaccagcgcaacctcgctggcgatgctggccggcgcgctggcttcggggctgttttttatccgcagcggccagcgtaagggcgacgcggcgctgattgatttcgcgctgtttcgcaaccgggcctacagcgccgcggtgttgtcgaactttatgctcaacggcgctatcggtacgatgatgattgccagcatctggctccagcaggggcatcatctgagcccgctggagagcggaatgatgacgctcggctatctggttaccgtgctggcgatgattcgggtgggcgagaagctgctgcaaagctacggcgcgcgtttgccgatgatgagcggcccggtctttaccgcggtcggtattcttcttatctcctgcacctttctcgataaatcgacctatatcgtcacggtctttttcagcaacgtgctgtttggcttcggcctgggctgctacgccaccccgtcaacggacaccgcggtggttaacgctcctgagaataaggtaggcgtggcctcggggatctataagatgggcagttcgctcggcggagcgatgggcattgcggtgacagcgtcactttttgcgctgtttttaccgctcggcatggccagcgcggcgcagtatgcgctgtggtttaacgccgcgctctgcctgggttcaatggcggtgagcgcgctgctgcttccgcgtacaggtcaaagctgatgttttttcagcagcgcccgcagctggtggtaggttagccccagcagttcggccgcctgcttttgattgtacttcgcctgttcgaggcttctctcgagcaggcttttttcttgctcctgctggaaagcgcgtaaatcgagcggcagcgtggggcctggcgtcttctccacttcgacgggcgtcgccgcgtgctgctggcggaaggggttaataataatattatccagctcgcgctcgctgctgccgtgacggtagaccgagcgttcaaccacgttttttaattcacggatattccccggccagcggtagttctgcagcgtcatggcggcgcgttcgctaaagccgggaaacagcggcagtccgagctcgcggcacatctggatagcaaactgggtggcgagcagcatgatatcgctctggcgctcgcgcagcggcggcagctgcaccacatcaaaggccagacggtcgagaaggtcggcgcgaaaaagtccgtcttccaccatttgcggcaggtcggcgttggtcgcgcaaaccaggcggacgttaacctgtagcggctggctgccgccgacgcgctccagttcgccatattcaatcacgcgcagcagtttttcctgtaccagcatcggcgcggtggccagctcatcgagaaacagggtaccgccgtcggcgcgctcgaagcgccccgggtgacgtttactggcccccgtaaaggcgccggcctcatgaccgaacagctccgaatcgagcagattttcattgagcgccgcgcagttcagggagataaacggcccctgccagcgggaagagaggaagtgcagacggctggcgatcagctccttgccggttccgcgctcgccaatcaccagcactggtttatcgagcggcgccagtcttgagacctgctccagcacctcaagaaagctattggcctcgccgagcaggttgtccttgtaatccgccatgatgaatttcgccatttagtagtgtgattcaccaggtcactttagcaatgcgctggccggataacaaccacttccattaaaatcaataagataaaaacttggcacggcatttgtattagtcatggcacaggccggtgcctgataccagaactatgaggattgaaattatgggtattttttctcgttttgccgacatcgtgaacgccaacattaactctctgctggagaaagcggaagatccgcagaagctggttcggctgatgatccaggagatggaagacacgctggttgaagtccgttcgacctcggcgcgggcgttggctgaaaagaaacagctgagccgtcgtattgaacaggccgttgcccagcaggcggaatggcaggaaaaagccgagctggcgctgcgtaaagagaaagaggatctggcccgtgcggcgctgatcgaaaagcagaagctgaccgaccttatcggcagcctggaaaacgaagcgcagctggttgatgaaacgctggcgcggatgaaaaaagagattggcgagctggaaaacaaactcagcgaaacccgcgcccgtcagcaggcgctgatgctgcgtcatcaggccgcaagctcctcccgcgacgttcgccgtcagctggacagcggtaagattgacgaggcgatggcgcgttttgaatcgtttgaacgccgtatcgatcatatggaagccgaagccgaaagccaccgcttcggtaaagataaatcgctggatcagcagttcgccgatctgaaagcggacgatgaaatcagcgagcagctggcggcgttgaaagccaaaatgaatcaaaataaccagtaatgtcttcgggcggcaccaagacgtgccgccgccatcagcaaggagttcacatgagcatgctttttctcgccatccctttgacgttgtttgtgctgtttgttttgccggtctggctctggctgcattacaacaaccgcaccgccagcggcagcctatcgcagaacgaacagcagcgcctgctgcagctgaccgatgacgcgaagcgcatgcgcgagcgtattcaggcgctggaggcgattcttgacgctgagcatccgaactggagagagaaataatgagcggactggatctgagtaaaaaactgtggcgcattccgcagcagggcatggtgaaaggggtttgcgccggcatcgcgcagtacctggacgtgccggttaagctggtgcgcctgattaccgtactggcaatgatttttggcctgttcctgtttgtggtggtggcctacatcattctctcgtttgcgctggatcctatgccggaaagcgagctgtatggtgaaaaaacgccgagcagcggagagctgttggccgccgcggataaggagctggcagcaggggagcgtcgtctgcgtgaaatggaacgctacgtcacttccgacaccttttcgctacgcagtcgttttcgccagctataactgaaagttgaggttaatgatgaacataaaatggcagcaggccgggcaaaaagtcaaaccgggtctgaaaatcgcaggcaagctggtgctgctcaccgcgctgcgctacggcccggcgggcgtcgcaggctgggcggtaaaatccgtcgcgcgtcggccgctgaaaatgctgctgatgcttgttctggaaccgatgctcagccgggcggcgcagcggttttctaaacgtcgcggatggcgtatgttatgagtgcctaaaaactcactctatcaggatgataaaatgcgaaaactgcttctgggtttagcgctggccatggccttacccgtcttcgcggcggagcactggattgacgtccgcgttccgcagcagtatcaaaaagaacacgtcgacggggcggtgaatattccgctggcggacttaaaaacgcggattgcggctgaagtaccggataaaaacgataccattcacgtctattgcaacgttggccggcaatctggccaggctcagcagatgctgagcgaaatgggctacacgcaggtggtgaatgccggcggcctcagtcagatcgccaggccgaaaagcgccagcaaataatcttcagccccgtcgcagcggggctattgcactttatgattagccctcatgtctatttccctcgttcttcaggctcaacaggatggcgatgaagcgactcaaaacagaatttaatgcgctggtgaatcgtggggttgaccggcatctccgcctggccgtcactggccttagccgcagcggcaagaccgcctttatcaccgcgctggtaaatcaactgctcaatattcacgccggggcgcggctgccgctgctcagcgcagcgcgtgaagaacgcctgctgggcgtcaagcgcgtcccgcagcgggatttcggcattccgcgttttacctatgacgaagggctggcccagctgtacggtcagccgccggtctggccaacgcccacccgcggcgtcagcgaaatccgcctcgctctgcgctatcgctccaacgattcgctgctgcgccattttaaagagacctcgaccctctacctggagattgtcgactatcccggcgagtggctgctggatctgccgatgctggcccaggactatctgacctggtcacggcagatgaccggattactgcaggggcagagggcggagtggtcagcgcgctggcgtcagctatgcgaaggactggatccgctggcgcccgccgatgaaacccgtctggcggagatcgccgcggcgtggaccgactatctgcatacctgtaagcgcgaagggatgcacttcattcagccggggcgctttgtgctgcccggcgaaatggccggcgcgccggcgctgcagtttttcccctggccggacgttgatgccgccggtgaagctaagctggcgcaggcggacaaacagaccaatgccggaatgctgcgcgagcgttttaaatactactgcgagaaagtggttaagggcttctacaaagatcatttcctgcgcttcgatcggcagatcgtgctggtagattgcctgcagccgcttaatagcgggccgcaggcgtttaacgacatgcgtctcgcgctgacgcagctgatgcaaagcttccactacgggcagcgcacgctgtttcgtcgcctgttctcaccggttatcgataagctgctgttcgccgcgaccaaagccgatcacgtcaccgtcgatcagcacagcaatatggtgtcgctgctgcagcagctgattcaggatgcctggcagaacgcggcgtttgaaggcatcagcatggattgtctggggctggcgtcgattcaggcgacgcagagcggccttatcgaggtgaacggcgagaagatccctgcgctgcgggggcatcggctaagcgacggacagccgctgaccgtctatcccggcgaagtgcccgcgcgcctgccgggtcaggccttctgggagcagcagggctttcagtttgaaaactttcgcccgcaggtgatggacgttgataaaccgctgccgcatattcgcctcgacgcggcgctggaatttttgatcggagataaattgcgatgaccgaacctttaaaaccgcgtatcgatttcgatggcccgctggaggtggaaaaggcgcaaattctgaaatccgcgcgcgcttttgacggcgccgatgcggagaagttcgctccagcgcggctcgacgcgccggaagaagaagagggcgcggcggaagcggtggtggaatcggtgctgcgacctaagcgcagcctgtggcgaaagatggtcagcgccgggctggctatttttggcgtcagcgtcgtggcgcagggcgtgcagtggacgatgaccgcctggcaaacgcaggactggatcgcccttggcggctgcgcagccggcgcgctgatcgtcggggcgggcgtcggttcggtggcgaccgaatggcgccggctgtggcgactacgccagcgcgcccacgagcgcgatgaggcgcgggacctgatgcacagccatgcggttggcaaagggcgcgccttttgcgaaaagctggcccagcaggcggggctggatcactcgcacccggcgctgcagcgctggtatgcggcgatccatgaaacgcagaacgatcgtgaagtggtgagcctgtacgcgcagatcgtgcagccggtactggatgcgcaggcgcggcgtgagattagccgttcggcggcggaatcgacgctgatggttgcagtcagcccgctggcgctggtggatatggcgtttatcgcctggcgtaatttacgtctgatcaaccgcatcgccactctgtacggtattgaactgggctactacagccgcctgcgcctgttccgcctggtgctgctgaatatcgcttttgccggcgccagcgagctggtgcgggaagtcgggatggactggatgtcgcaggatctcgcggccaggctatcggcgcgcgcggcgcagggaattggcgccggtctgctgacggcgcggctgggtattaaggcgatggagctgtgccgtccgctgccgtggatcgccgacgataaaccgaggctgggggattttcgccgcgagctgatcggccagctaaaagagacgttgcagaagagcaaaagcggcgcggaaaaataagtcgcttaagcattcccggcttgcggcgtgaacgccttagccgggctaccgtttcacagaaggctgtaacctgtagcccggctacgcgcagcgcaagccggggagaaaagcagaagcgatgatagccgcttatctcatcgtcatttttcctctgagcgcataactttacggcagaaaggccatttttccgccatactgtcaataattgttgacagctatcttcacgccagcaaataactgtcctattattcatcggttattggcctctttagggtgaaaacgcctatgcgtcttgaagtcttttgtgaagaccgtcttggtctgactcgtgaattgctcgatttactggtgctgcgcggtatcgacctgcggggcatcgatattgaccctattggccgaatttatctcaacttcgccgagctggatttcgccagcttcagcagcctgatggcggaaattcgtcgtatcgccggcgtcaccgacgtgcgcaccgtggcgtggatgccgtcagagcgcgaacatctggcgctcagcgcgctgctggtggcgatgcctgagccggtgctgtctctcgacaccaaaggaaaagtcgaactggctaacccggccagctgccagctgtttggccagagtcaggagaagctgcgcagccacccggtcgcgcagctgattaccgattttaacgtccagcgctggctggaaaacagtccgcaggagtcccacgccgagcacgtggtggtcaacgggcagaacttcctgctggagatcactccggtttatctcgaaggcgaacacggcgagaaggtactgaccggcgcggtagcgatgctgcgttcgacggtccgtatggggcgccagctgcaaacgatgaccattcaggacaccagcgcctttagccagatcctcgccgttgggccgaaaatgcgccacgttgtcgagcaggcccgtaagctggccatgctcagcgcgccgctgctgatcgtcggtgataccggtacagggaaagatttgctggcccacgcctgccatctggccagcccgcgcgcggggaaaccttatctggcgctgaactgcggctccatcccggaagacgctgtggagagcgagctgttcggcgacgccgttcagggcaagaaaggcttcttcgagcaggctaacggcggctcggttttgctggatgaaattggcgaaatgtcgccgcgcatgcagaccaagctgctgcgcttccttaacgatggaactttccgccgcgttggtgaagatcatgaagtccacgttgatgtccgggtgatctgcgctacccagaaaaacctggtggagctggtgcaaaaagggctgttccgcgaggacctctactatcgtcttaacgtcctgaccctgtatctgccgccgctgcgcgattgcccgcaggacatcatgccgctgaccgagctgttcgtggcgcgttttgccgatgagcagggcatcccgcggccgaaactctccgctgatttgaacagcgttttgatgcgctacagctggccgggcaacgtgcgccagctcaaaaatgcgatctatcgcgcgctgacgcagctggacggtttcgagctgcgccctcaggatattctgctgccggatcacgacgtctcctcgctggcggtaggcgaagaagcgatggaaggctcgctggatgatattacccgtcgtttcgaacgctcggtgctcacccagctttatcgcagcttccccagcacgcgtaagctggccaagcgtcttggcgtctcgcataccgccatcgccaacaagctgcgtgaatatggcctgagccagaaaaagggcgatgagtaatgcccgtcggccggctgcctgcgccgccggccggcatttccagaaaagggaggggggctggcgtcaaatgaatcggtatatactgcgtttttaccctctttatggcaggcatacgcatgtggatctggcgtagtcatttttttcaatggatgaaactgctggcgctctccagcgcgatctcttttgtgctgttctggtttcaccttcccgccgcgctgctgctggggccgatgattgccggcatcagcctgagcctgcgcggtgcggaaattcgcgtaccccgtcccttttttattgccgcccaggcgattatcggctgcatgattgcccgcagcctgacgccctccattttcggcgttctgctggcaaactgggcgctggtgctgctgattctcttttccacgctcgctatcagcgcgctggcgggatggctgctggtgcgctacagcgatctgcccggcgccaccggggcgtgggggagttcgccgggcggcgcctcggcgatggtgattatggcccaggagtacggcgccgatgtccggctggtcgcgctgattcagtatctgcgggtgctgtttgttgccggcgccgcggcgctggtggtgcgcgtcgcgctcggcggtgaagcgcaggagatgactcagcaggtcgcctggtttccgccgatcagccggcagctgccgcttacgctgctgttgacggcggcggcggggtggcttgggctgcggctgcgctttccttccggggcgatgctcttcccgatgctgattggcgcgctggtgcagggagaaggctggctgctgctcgaacttcccgaatggctgctggcgctggcctatgccgccgtcggctggagcgttggtctaaagtttaataaacagattttcctgctggcgctgaaaaccctgccgcagatcctggcatcgattatcggcctgatcctgctgtgcgcgctgatggcttatgggctgacgcaggttttgccgctggactttatgaccgcctatctggcaaccagtccgggcggactggacacggtggcgattatcgccgccggtacgcgggcggatatgtcgtttattatggcaatgcagacgctgcgcctgttcaccatcttattgaccggcccggcgattgcgcgcttcatctcccgctatgcggcgcggcaataaaaaaagcccccgtttaacgagggcttacgtaactcagcgaggatattacgctttcagcgcggccagggctgcgtcgtagtccggctcttcggtgatttcattcaccagctggctgtaaacaacctggtcattttcatcaatgacgaccacagcacgcgccgccagaccggccagcgggcccgcggagatagcgacgccgtagtcggccaggaactgcgcgccgcgcagggtagacagagtgacaacgttgttcaggccttcagcgccgcagaagcgagactgcgcgaacggcaggtcagcggaaatgcacagcacgacggtgttgtccagttcagacgccagctggttaaatttacgtaccgatgccgcgcaaacgccggtatcgatgcttgggaaaatgttcagcactttacgggagccggcgaactggctcagcgcgacgtcagagagatctttggccaccagcgtaaacggctgcgctttagcgcctgcctgcggaatggtgccttgaacagaaacggggttgccctggaaatgcacggtttgtgacatggttatcttcctgtttacatatagttaacgtcgcggctagtgtatgacatccgtcatcagcacggcaaatccttttaatacttacctgcgaggttcagggaatgcgaaatctgcgagtctatgaagaagcctggccgttacatactccgtttgtgatcgcccgcggcagccgcagcgaggcaaaagtcgtggtggtggagattgaagagaatggcgtcaaggggacaggtgagtgcacgccctatcctcgttacggagagagtatagcctcggtgatggcgcagattatggcgattggcgaacagattgaacgcggcgtctctcgtgagcagattcagcacctgctgccccccggggccgcgcgtaacgccgtggattgcgcgctctgggactgtcaggcgcgcagcgcgggtaagagcatcgcgcagctgttgggcgtgacgctgcccagccgggtggttacggcgcaaacggtggttatcggcacgccggaccagatggcggcgagcgcggcggcgctgtgggaaaaaggggccacgttgctaaaagtaaagctcgacgatcatctgattagcgagcggttgattgccattcgtgaagcggttccgcaggcaacgctcatcgtggatgccaacgaagcctggcgcagcgatggcctggccgagcgctgtcagctgctggcggatatcggcgtggcgatgctggaacagccgcttccggctggggccgatgaagcgctggagaattttatccacccgctgcccatttgcgccgatgagagctgtcatacgcgcgacagcctggcggcgctgcgcggccgctatgagatggtcaatatcaaactggataagaccggcggtctgaccgaagcgctgctattggctgaggaggcggagcgcctgggatttgcgcggatgctgggctgtatgctgtgtacctcaagagccatcagcgcggcgctgccgctggcgccgctggcccgatttgccgacctcgatggcccgacctggctggcggtggacgttgagccggcgctgcatttcagcaccggcgtgcttcatctttgaggatgccagtgcagcaggtccgtcatcgcctgaaggtatttatccgtcgcctcgtcggcggatatcggcgggaattcggcggtgatgcagggcaggccgatatccgcgcaccagctgccaaaggagccgggcgtttcatagccgacgctgcccaccagcggcaggctgaacgccccggcaagccactgccccagcgcgctgtggccggggtcttcaatacaggccagcggatcgtgaaacgagaccacccacgcgggatggatctggtggatcagctggcacagcgcctgggtttccggttctgaaccgggtttttcgccggtgagcagaaccacatcgcgctgttccgccgcgctgttccagcgataaaccgtttcgccttctttccagtttgccgccggaaaattccggttcaggtcgatgccgcgcgcgttggcgcgcagccccagctggcaaccgtccgggttgaccgccagcacgacatgatggcggcgcagctcgggtttgagcgtacgtagcgcgcaggagagggtgacaatcgatgcgttttcatcgccgtgggtaccggcaagtatcaggccgctgcggctatcggccagcggtgcagggaaccacaacagcggtgcgccgaggtgagactggccatagcgttgtgtgccgggcggaaaatcaccgcgctgagggcgaggacgagaaacgggcatagggcatcctgttgtcaggttatttttcagcagtgttgtgtaaaaccgtcccggaatcaaatagtttccagtgaggacgaaatcagcatatatgtcaactttctttcacaagccgtttgcaatttcaggtgatgaaacaaataattatcgcactgccagctctggtttttttattttaaaggggatcttatgaagtatcctgtcacattgacatgcggcgcgctgtggttagccagcgtctcttctcttgcctgggccgccgatgtcccgccgggcaccgtattagccgaaaaacaggtgctggtgcggcacattaaagatgaacccgcctccttagatcccgccaaagccgtcggtctgcctgaaattcaggttatccgcgatctttttgaaggtttagtcaatcaggacgagaaaggcaatctgatcccaggcgtggcgactcgctggcagagcaatgataatcgtgtctggacatttaccctgcgcgataacgcccgctggtccgacggaacgccggtaacggcggaggatttcgtctatagctggcggcggctggttgatcctaaaaccacctccccgtttgcctggtttgctgcgctggccggaatcgccaatgcgcaaaatattattgatggtaaagccgcgccggataccctcggcgtcaccgccgtggacgcgcgtaccttgcgcgtgcagctggataaaccgctgccgtggttcagcaatctgacggcgagctttgctttctatccggtgcagaaggctaacgtggagagcggcgacaactggacgcgtccgggaagcctgattggcaacggcgcgtatgtcttaaaagatcgcgtggtgaatgaaaagctggtggtggttcccaatacgcactactgggataacggcaaaacggtgatccagcaggtcacatttacgcccattaaccaggaatcggcggccaccaaacgttatctggccggcgatatcgatatcaccgagtcgttcccgaaaaatctgtaccagaagctgctgaaggatattccggggcaggtctataccccgccgcagctgggtacttattattacgcgtttaacacgcagaaagggccaaccgccgatgagcgcgtccgcctggcgctcagcatgactatcgatcgccgtctgatggcggagaaaattctgggtaccggcgagaaaccggcctggcgctttaccccggacgtgaccgcaggctttaccccgcagccgacgcaaatcgagagcatgagccaggccgagctgaatgcccaagccaaagcgctgctgcaggcagcgggctacggtccgaaccgtccgctgaagctgacgctgttgtacaacacctcggagaaccaccagaaaatcgcgattgcggtggcttccatgtggaagaaaaatctgggcgtcgacgtgaagctgcaaaatcaggagtggaaaacctatatcgacagccgcaataccggcaacttcgatgtgattcgcgcctcatgggtcggggattacaatgagccgtcgacgttcctgtcgctgctcacctcgacccatagcggtaatatctcccgtttcaacgatccggcctacgacaaaattctgacccaggcggcgctggaaacatcggaaaaggcgcgcaatgacgattacaacgcggcggaaaaaatcattatggcaaaagcgcccatcgcgccgatttatcagtacaccaacgggcgtctgattaaaccgtggctgaaagggtatccgatagccaatccggaggacgtggcctatagccgcacaatgtatatcgtgaagcactgatgcgtactgacctcctgctaacatcagacaaccatcgctaaacccataactggcgcggtttacagcgccagtttctcctttcgcattccgagtatcttcacccaggtcgtttcagctccaaattcccactttccgatgctgttattcgttcaggattaaagcagagcccgtcaactcagtgaacaactttagctcgcgcgcgttgcaggcgtcgcaacgtaatagtactggcaccagcaaccagaggcacgccttgcccggctgttgctaatacaacaggcggtgtgcatcagttggcgcattcgcaacagctcttgcgcaagccaatttattaaagccattgattaacatgaattaaataatgcgcagcctttggcatgattatcgctaacacccatataacaaaattaaaataactcttcgataaatatcgaatatggttatataggaaatggataatgacgcagaaagctgacgaaaatatcaacatattggcgttctctcgccgtaggttgctctcgcagagcaaccttagcggagaaagcgaggaatggccgggcgactatcggcaggcaacgctggcgctgatctccggctggaccggtattgacttcggtcagtatcggccggaccaggtgctgaaatacctgcataccaacgccatccagtcggcggttgaggcgttttccaccgccgacccgaatcgtcaatggacggtggaagcgctggcggactgggtgggcatcggcggctttggcccgctgctcgtcggcagtgcggaaacggtggccgatgaactgcaatcctgggtcgaggaaaccgatgtcgatggcttcaatctggcctacgccgtgacgcatgaaaccttccgcgacgtggtggagctattaataccagagctgcaaacacgcggcgtctttaagcaggattaccgggaaggcacgctgcgtgaaaaactgttcggcgccgggccgcgcctgaccgcgccgcatccgggggcagactaccgtcgcggcgtgcgaaacgatgtcggggcgaaggagacggcggcatgattgatatcgataatctgcataaacgctaccgcacggcggatggccgcgtcagcgaggttctgaagggattatcgctcagggtgcccgccagctccattaccgcggtggtagggccgagcggcgcggggaaatcgaccctggcgcgctgcatcagcctgctggaacgccccgatagcggcagtatcaaggttaacggcaaagatttgtcattactgtcaggggaggcgctgcggcgtgaacggcgcgcgatcggcaccgtttttcaatcctcagcgctgctgaatcgcaaaacggcgtggcaaaacatcgcggtgccgctggagtatctgggcgtggtggaacgcgacattaaggcgcgggtcggtgaactactggagagcgtagggctgagtcacaaagcggaggcctatccgtcccagctttccggcggacagcgtcagcgcattggtatcgctcgcgcgctggcattacgtccgtcggtactgctggcggacgaggccacgtctgggctggatccccaggcgaccgccacggtgctgggtttgctccgacagctacgtgatgagtaccggctggcgatagtcctgattactcatgaaatggatgcggtacgctccgcggcggatgcggtggcggaaatccgcgatggcgcgatagtccagtacgggcaggtgaaagagctgctggcccgtccggattccctgcttggtcagcagctattgccgctgtcgcccatcgctgttaacagcgatctgctgctgcgcctgagttatcgctgggatgtgccggtggcgactgactggatcagccgtctgagccaccagcatgcgctacagatagatttgctaggcggccatgtggaagtgatcaacggtcaactggcggggcgtttacaggtcggcgtccgatttcagggacaacgactgtcagcggatcgaacgatcgcgcttttagcgcagctgggcattgcggcggaaatccttgctcatgcccccgagctacaggaggcggtatgaaaccgacagtgataagccaggatacgccgtggcatgaaatccacacattgctgctgcctgcttatggtgaaacctggctgatggttgccattgtgatgctgtttgtggtgacccttggcggcgtggtgggcgtggtgttattcaacgcctcgccgcgaggattatttccgcgtcccgcgctttaccaggtgcttaactggggcgtcaacatggggcgctctctgccctttctggtgttaatggcggcgattatcccgtttacgttctggcttacgggcaccactatcggcatccctgccgcggtggtaccgatgattgccgctggcgtgccattttttggccgtctggtggaaaacgccctgcgcgaactcccggcggaggttaccgcggtggggctggtgtgcggcggttcgcgctggcagataatccgccacgcgcagctcagcgaggcgctgcctgcgctggtggcggcggtcacgcttaacctggtgtcgatgatcgaatattcggcgattgccggcactatcggtgcgggtgggatcggctatctggcggtcgtgtacggctatcagcgtttcgacaatcacatcatgatcgccaccattgtcgtgctgatcgccacgattcagatcattcaattctttggcgaccgtctggtcaataagcttcgccacactcaggggatttcttcatgacaacagaacagtttgaactccgtaaagcccgccgctggccatggctggcggcgctggcagcgatcgcggcgctggccgtcgcgttctggtggtggcgcggatacgcgcaggcgccgcaggtcgttttcggtacgacgttaaaaattcactacgaaccggcgatggcgggcgagcagcgaattattgagtacatcagtcagcatattgcgcccgattatggcctgaagctggaggcggtgggcgtacaggatccggtacaggcggacagagccgtggcggaggggcagtatgccggcactatctatcaacatcagtggtggcttaagcaggtggtggacgccaacggttttgcgctttcgacgaccgtaccggtttttcagtgggccttcgggatctattccgaccgctataaatcggtacaggatttgcccgtcggggcgaccctcgtcgtgccggatgatggcgctaaccaggggcaggcattatggttgctgcaaaggatagggttaatctcactcgatccggcggttgagccgcgcacggcgaaactgaaaaatattgtcggcaacccgcacaagttcaattttaaagagctggatttattaaccatgccgcgtgcgctgaattcggtggatgccgctattggttatgtttcacaatttgatgccggaaaagtcccgcgggaaaaaggcatattattcccgcctgcgcctaaaacgtttgcctcgcagttagtcatcggtacaccgtatttatcgcaggagaatattgttaaattaaaacaggctttttccgatccgcgtattcagacgtggttaaagaccactgacgatccgctggtcaaagacgtactggttccggtctcagcaaactaaggcatcattgatgaaacgataataaccggacgggcgtttgctcgcccggttactggcgttattatttattaacttattgaatatattgataattatatgattatttattgtttttaatatgctaaagcccggcttataaccagagtcacctgcacaattatataaggtaaataatatgagtactctgtctgttgataatgctggcgccgtttcggcgccggtgagtagcgtcggggatgtggcgcgattaattaattccggcagggagcagagtaaatatgcgcggatgattgtattcctcgcgctcggcggtgtattcctcgacgcttatgatttaaccacgctctcttacggtattgatgatgtggtgcgggaattccagctctcgccgtttttaaccggcattgtcacctcgtcaataatggtcggcacgattatcggtaatttaatcggcggctggctgacggataaatatggccgttattcggtgtttatggccgatatgctattttttgtggtatcggcgattgcggcgggactggcgccgaatgtctgggtattaatcggcgctcggtttctgatggggattggcgtcgggatcgatctcccggtcgccatgtcttatctggccgagttttcccgctttagcgggaagggtaataaggccgcgcggctcgcggcctggtgtccgatgtggtacgccgcctcgacggtctgttttttaatcatctttgggctctatttcctgttgccaaaagaacatctggactggctgtggcgcgcatcgctgctgttcggcgcggttccggcgctgctgattattgccgtgcgcagcaaattcatgaatgaatcgccgttatgggcggccaaccagggcgatttgacctcggctgtgcgtattctgcgcgactcttacgggatcaacgctcacgaagcaccgccagaacgtcctgctccaccgcctaaagtgagctttcgcgtgctatttgcaaaaccgtaccgcgaacgcactattgtcgccggagtgatgaacgtctgtatctcatttgagtatacggcgatcgcctttttcctgccgtccattctcgcccaattccttggcgctggcgtgttcgaaaccatctccgcttcgctgggactcaatgcgctgttcgcctttaccggagggctgctggggatgcacctggcatggaaatacccgtcgcgacacgtcgcgatcgccgggttcgcactgcagtttatcgccctgatcgtcctcgcgctggtggggcagccgcaggccgcgctgggtgtagcgctggcgattgcgatgctggggctgtggctgtttgccgagggctttggtcccggcgcgcagttgatgatctatccggcgctttcatacccaaccgcgattcgcgccaccggggtcggcttcagccgcgcgctttccggtattggcagcgcgctggcgctgtttgtgctgccgctgctgcaggcatcgctcggtacgcaaatgttctgggtcgtatcgctggccgccattatcccaattttcttcctgctcgcggtacgccatgagcctacccaatatgacattgacgacagccaccattgaggaacagaaaatgactttactctctaccggcaccgactatgaacagctggcggcgaccttccgaccgatttttgctcgtatcgcgcagggggcggcggcgcgcgaacaaaaccgcatcctgcccgatgagcagatccgctggctgaaagaggccggatttggcacggtacgcattccgcgggaaaagggcggctggggcgcgtcgttgccgcaattaattgcgctgcttattgagctggctcacgccgactccaacctgccgcaggcgctgcgggcgcatttcgccttcgttgaagaccgcctcaatcaacctgactcgccggcgcgcgatcgctggttccgtcgcttcctcgacggcgagctggtgggcagcggctggaccgaaatcggcgcggtcaggctgggggaggttttcacccgcgtaacgcccgttgaaggcggctggcggctggacggtgagaaattctatagcacaggtacgctgtttgccgactggatagatgttttcgcccggcgcagcgacaaccagggcgatgtgattgcgctggtcagcacgagccaggccggcgttgaacgcgaggatgactgggacggcttcggtcagcgtctgaccggcagcggcacgacccgcttcaaacaggcgcaggtggagcaggatcacgtctacgactttgcgcagcgctttcgttatcagaccgcgttttatcagcatatcctgctggcgacgctggcgggaattggcctggcagttgagcgtgacgtcgccgaaggcgtgaaaaagcggacccggatgtacagccacggcaatgccgccgtgccgcgcgacgatgcgcaggtactccaggttgtgggacaaatcagtagctggagttgggcgacgcgggcggcggtattgcaggcggcggaatcgttgcatcaggcctaccttgcgcatgccagcggcgacgaagcgctcattgaacagcgcaatcgcctggctgaagtcgaagcggcgcaggcgcaggtgattgccagcgactggatcccgcgtgcggccaccgagctgttcaacgccctcggcgcgtcggatacgcgagtgagtaaggccctggatcggcactggcgcaacgcgcgcaccgtggcatcgcacaatccggtgatttataaggcgcgaaatatcggtaactggttggttaacggcgaagcgccaacatttatctggcagattggcgacggcgagaaatcgcagggctgagaaacacggcgaaggagcctctccgtaaggatcgttggcactcccatcacgattgagcgagggagcatcccccggatcatggacgactgggggcagtaatcatgccgggtttggctggctaacaccccagtatattgggtacggataaagtaacggggctacacttccttcatcaacattgtacgtaagggaaaacgacatcagggcagcggtgcgctggagacgctggtgcaggacggcgaccttttcgcagatattgcaatacggtctgactcttaaacaacaaatagctaccgaaaatgcggcaagaaattgccgcatgccactctttaacgtgttaagaagatggctgaggtccaaatccgggactggtccttttgcctggcactgatgaagaacggatgttcccgtttttctgacaggataagttcagaaagtggaatttcgccgctgatatcacgtggaagcggctgttcggtaaccagttcaatatctacctgaagttcggtgcctggaagcgtaaaagtctctttgcctgcaatcagaagcgtttgaccatcaatatccgtttcaaaaaccggcgcccaggcatgtggttgtggcaaaagcggatcgcccactttgatatagctactgatgtccagatgaacgtgtatttttgctccggccagcccaccggtactgacagtaactgtgtcgctgtcaccattggtgtcggtccgcaagccaatctgtgtatgacttttacgccagacggtctgctccgggtgatctgcgcccgagagggaaaacgcattgattggtgtccctgtgacctcaatatgtcccgtccagtaagcaccccgatagcggtccttaatgcgtgcaccccccagacgcacccggaactgatatttagagcgcccaaattccgcgtgcaaatcgcgatgccatacctctctttctccatcgtaaagcgttaccgcttcccagcccgcatcgcctaacagacgataacgcagtacatctgctgaactgaattccgctacatctcccatcagcgcatcgcccgcacgcaactcggcatagcttcgttcacctgttgtggcataggtgtggcgggcacgaagcgctgcagccacaccttttctgtcgaattgttcagcaagtacgccagtcaggcctccacgggatccgaagacggctgtcgcaggcacgccaccaccacatcgcccctgatgttcatcgctgttggcggtcgcgcccagacgatagccccgttcgagcgcctcggcatagacccagtgaaactgcccccaggcggaaccgacttctatcaagcgctccagctccgggtgatgccagtccaggttgcagcgacgcccgccaacatgcgggattaacagatgtttgtgcggttcgcgtgcgtaggccgcataaagttcatcaagtggccatgcacccggtttgatggttccggcagtgaactcattccactcgaatgaacgcaccagccgcccctgattatcaaacgggaactgaggttcatcatcttcaaggaacaccacattatgatcgccaccggcgcaggtattaccgcaccactcggtaccggaatagcagacaaaactgtctggctggttcagcgcattaatcagctttaccgcctgcttccagcgcgcttcagtcacgttaaaatcgttggcggtatagccaagaatatcgagaccggcgacatcacgcccgtagctgaggttatacagcgtgtcgttggtaccaaccgtgtcatcagaatgcacatgaagatcggcatagagcgggcgcagacctgtggcggtttcctccaccgttatccatcctttgccttccagcaagggcagcgcgcccagtgcggcgctgaacgaccattctcctgcgcagagatgcaaattgctgatacgcgcaatcgcccagccctcttcggccagccggaaatcatgatgctgtgtttcacctcccgatgaggtcagcgtcaggcatcctgccagcggcaggctccggcaggtattcccccagcggtcatccagccggacgataacggagaaaggcgtttcaggtgccagtaaccttggcgcgatcgcggcaagagaagcgggctcaccgggcacgatatccagcagcgtatcgccgggcacctcagcaaattttgagctccccagcggatcaacaaacaggcggaagcggaaagctttctcaacgaaactctgtacacgcgtaccgcccccgccatggcgccgatcgcccaggcggataatgattttgtctcccggattgatgtagccatcaataatgtcgatcagaatggctttctggaacggacgctcgtgccccttctgatcaaaacgcaccttcaaatgctggaccgtggcagggctctgtcctggcactagcgggcctgcctgatactcggcgctgacatagttggctgccgagggatcgctggtctgaaacagcgcccagtccgagtaaaatttaaaggcgagcttcagccatgcgccgtcagcaagcccgctggcgcccacggtatataccagttggatctcttcccacgcaccggcagtcaactgagtatgcgagcaggccacactgcccagaaacggccgggctttattctgctcatacaagcccttcggagcgatgtaatcgcctgcatcacggatatcgaactgactcacattaacctcacaattattgggcgcgccagcgctgatagcgctgttcaatgcggcgaaaaacaagattttccattaaccaggcgataagcccgataaggcaaattcccagtagtacctgactgctgttacccgtctgtccgcccatggcaaccatccagcctatgccctgagaggcgccgagcatttccgctgccaccagcgcacgccatgcctggctgaatccgatgcgcagtgcggcggtgataaatggcagggaactgggcagatagacatgaagaagcagttgaaacggtcgagctcccagcgtgcgtgctgcacgcacttcaccgccacggatgccgcggatcccctcctgaatggccagacacatcgggaacagcgcagcgatgacaatcaccaccacgatggaaacgaatcccaggccgaagatcagcagcatcagcggtgcccatgcgatgggcgggatagccataaacaggctgttcagtggcgtaaggaactccctgacgcgatcggaaagtccggcgctgacgccaagaatcagtgccagcagcacggcagtcaaaaagccggtgaattcttccagcaggctggcctgtagctgaccccagatggaaccatcactgaaccagcgtatggcttcccgccatacgtcccagggttgcggcaacacataagagggatagtgactcgcaacgataacccagaccatgagtaacgcgggcagggaagcccagccccagtttggtttgaacttcactgcgttatccctgcttttgtcagccactgcgtatcaacaaattcattcagctctggcgccttttgcatgtagcccagcgtctgtgagtccttcatcagctgctcaaaaaaggcgccatctttcttcgtcagtgacacagaccactcaatacgtttacgggcttcctgaaccagcgcctccggcggcagcgttttaccgtcagcggttttaatggcccgcagcttaaacgcatcggccatgatccgatcggcttctgcaggatgctgattgataaaatccactgctttctgatgcgcacggataagcttcactacatcgtccgggcggtccttcagggtctccggtaacgccatcagtacataccacggataacccggttggactttgtttacatcgagcagcagtctggcgtcgccgcgcagcagtgcttcgctgacaaagggctcccaggtgaaggctgcatccacaacgccctgctgcagcgcagcgggcatgttaccggcgggcatactcaggatctgagcatctttgtcagcaaccagacctgcctgctgttgcagcaccacaccgcgcagcagaacatccattccgctcccttttttgacgccagcgatgcgtttgccttttaggtcagccaaccgggaaatagcactctgtgcgggaacgatcagcgcggcctgtccgctgttcaccttagcgataatttgccccttgagcccgcgcgaaaaccactggaataccggtgtcgcacccatataggctgcatcaagttcatgcgccgccagcgcctgactgatgacgggaccatcaccaaaggatttaagctcgacggtcagcccttcctgctgataaaaaccctctttctcggcgataagtgcaggcgcgttggccagcgcatagacccagccaatacgcagcggctgggaatccgcagcgtcagcagcattgaataaaacccctgatatcagcacagcaagaaatgatttacccatttgattgatgttccgttttgttagagtgagtggttgtcggactgctgcatcacatcggtaatgcgcttcagtaattcattacggtacatggcaaaagccggaagctgtcgcgtctccagattgcttcgcgggcgcggtaaggcgatagacaattcgctgtgtacgccaccgggtgcacgattcagaacgatgacgcggtcagcaagaaacacagcctcttcaatatcgtgggtgatgaagaccgttgtctgcccaatggcggaccagagacgtagtgtctcctcgttcatgtccccacgggtgatggcatcgagcgcagcaaatggttcgtccattaacagaacatccggctccagcgccagcgcgcgagccagtgacacgcgctgctgcatgcccccggacatctggtgcggcaactgatgtgcggcatgtaccaggcccacacgttgcagatatgtcatagcgcgtcggcgctgagaggccacgtcctcgcgcctttgcatccgcaatccgaaccggacattctccagcgcggtcagccagccaaagagctgtggctgctgaaaaacatagccaagccgatggttttccggcgtggtacgctcaccgccaatccgcacggctccccgctctggttctgtgaaaccggccagcagattgagtaacgtgctcttaccgcaccccgaggggcccagcaacaccacaaactctccctggcgggcatgaaaactgaaatggctgaataccgacgcgccgccgggatagcgaaaagtgatattgtctaccgccagtgcgtatggttgagaattggtcatgctgagcgtcatgtataagaaataatgagatgtggttataatacgtattaatacaagttgatctaagatcgcttctgactaaactagatccgaacggaatacgagagacggaacctgaatgacactggtgcgtgaaaacatcacatcgctctaccggcagattgccgataccctgcggcaggaaattgccgccgggcattttcaacctggcggaaaactgcccgctgaagctgcgcttgaacagcgatttgcggtcagcagggtgacggtacggctcgcgctgaagcatctgacagagcaggggattgtcgagcgcaagcagggaaagggaacctacatatcgggcaagaaggttgcacatggcatcaacgtcatgcgtagctttcatgagtcgctaaagcagcaggggctgaatgccacaatgcgtttgctggtcaaagaggaggtgccaacgccagagtcgctgcaatcgctgtttcaaatgtcccggacgctgacgtttatttcacggctgcatctggtggataatgatcccattgcggtgggttacagtcatttccctgcatttcctcatgagctgagctgggaagagaccgagaaggaaccgacctgggtcctgttagaaaaagccacgcaacatcacatcagtcgctccgatattgccatccggctggccttcgcggataagggactcgttgacgtgctgggaaccgataaaaacgcgccgctttttctactggagcgaacatcctggtttgaaaacgggcagtgcgctgagaactctcgctttttcattcgtccggaacgctacgagtttattttgagcaacagctgaagtaggggttctgattctcaccggtgaattaatttgactgggtattcagagtattggcaatccggtcatgaacctcgcgatctggatgatgttcatcattctgttatcagaatatggggtgaatgtcattagcccttaatcttcttcgtaaatcatcgtagctacgattgaatgagcgctgacagggggatacatggattcagcatacgcgtttaagaatttggtttcaggaacgtccctccggaaagtgaaggcatgtttcttgtctggcccacatgcgggtcaacagggcactgttaacatattgtccgtcaggctgttccagagtatctcacttcggcaatccgcgcggccgatactgcacccaccggcgcaatactcagtggaaagtctgcgcaacgggctgaacagtgttagcgtgtgatgctgccaggtcgaaggggaggagtgctgcgctatagctgaatcaggctgggctctcttccccctgatactgcaagcataggggtgatctcattgaattggttgcacaatcagtagatcacaaaacgctatgcttgtctttttcacctgcccatgaatggggattcctcagtgcctcagcggggctttttacttaatctttcaacgaaatccctttcattgtttcccagattctatgcttatcctgctcgtgtaaattcttctgctgcacggcgtgcataaatgcctcctggccctgttccgtcagaggttgcccggactttaatcgtgccgccacactttgcagaatacgatggctaagttggccgatttgcgtccggacatcctgaagcgggcgaggccgccagtcagtttccggcgccgccaaccagtcggcgcgatagcggtactgaatcgccttggcggcgtccatctgcgcctgaataaatggccttacgctctcgccttttaatcccagcgaatcagcatcagcagtggcgctctccagaaccttcttctcttgctgtagatcttcaatcgcctggtgatgttgcgctttatatccggcaacatctttcatcaaggacaaacgttcattgatcaaattgccaatcgaagggggtgaagcagaaattgccgttgcagagaaacttgcggcagcgagaagcaacacggctgtatagagcttgtacggcatcataaatctccgacgtcgataaacaggaagtctgtaaaggcgttcccggtcagttgaagaaacatttcgcagaaagcgtagctagcgcattttacagtcttgtgatgataaaaaaaccgtaaacccgatccgggcttacggttctcttttacagcggggttaaaaattacttcgacacgtccgcaccgaagtatttctgggaaatacgttcgtaggtgccgtcggccttgatctcttccagcgctttatcaatcgccgctttcagctgcgggttgtttttgcgcagcaacacgccggatttctccgcgtcagactgggttgcgacaattttcactggcgcatccggtttatgttttttgaagtcgaggaacgacaggttgtcgttgatggtcgcatcggcacggccctgcaccactaaatccacagattggttaaagccatcggtcggcacaatatccgccccgtatttacgagcgatctgcgcatagttactggtcagcgtgtgggctgattttttgcctttcagatcttcaaaacttttaatgctgcttttgtcattgacgatcagcaccgctttagacgcgatatacggctcggagaagtcgaatttcttctggcgttctggcgtaatgccgacctggttaatcaccacatcgtaacggctcgcatcgacaccggcgatcaggccgtcccatttcccttctacgaactgcgggctcactttcaggcgtttggcgatttcacggccaatctctacgtcaaaaccctccagcgtgccggaagcattgtggaaagtgaacggcggataggtgccttcagtaccgattttcagtacgccagcggactgaatctttgccaaatcatcctgcgccagcgctgcgtgggcaaaaccaagctgcataatcccggcgacgactaatgttgcgagtgctttcatctgcattaccctatgttgtttttattaactcgccccggattacgggagcgcggtgcttaaagaggcgataaactccgcagttcggggtctcttcgcgtgtaaaaacaaatcgttagcggagccggactcaacaatttccccggcttccagaaacaccacctggctggcgatattcgccgccagacgcaaatcatgggtcgccatgatcatggttgttccttccagcgccagctggcgcagcacggccaccacttcgccggagagctcaggatcgagtgcggaagtcggttcatcgcacagcagcaccgccggtgacggcgccagcgcgcgggcaatcgccacgcgctgctgctggccgccagagagcgtattcggcagggcgttgcatttgtgcagcatgccgactttatccagcagttcttcaccacggcggcgggcgcgttcgcgatcccatttatgcaccgtaatcagcccttcggtgatgttgtcgagggcggtcatatgcggaaacagcgcgaagttctgaaacaccatgccggtctggcggctgatgcgacgaatatcctggccttttatccgcgtgtccggcgcgaatgtgatgcgctctttgccgatggtcagctccccgtactgaggaatttccagcaaattaatgcagcgcaataaggtgcttttcccgctgcctgaagggccaatcagcgtggttaccgtgccttcttcaatctttaaattgatgttcttcagcacccggctgccgtcgaaacttttttcaatgctggagagcgttatcattgacctgaccttttactgtcgtacccgctaatttccgctccagcttctcttgcaaatgcgataacaccgaactgaagaacagataaataatcgccgcttcgctgtacagaatcagcggttcataggtcactgccgcaatttgctgcgcggcaagaaacatctccggtacggtgatcaccgacgccagcgaagtgtcttttaccagtgaaataaaggtgttagagagcggcggcacggcgatgcgcgcggcctgcggcagaataatacgacgcagcgactgcgcccatgtcatgctgatggaatgggcagcttcccattgccctttcggcacggccagcagcgttgccctgatcacttctgaggtatacgcaccaatattgacggtaaagccaatcaccgccgcagggaaggcatcaatggttagcccagcgctcggcaacgcgtagaaaatcaaaaatagctgcaccagcagcggtgtaccgcgaatcagccagacgtaaaaccgtatcaccggctttaaaaaggccgggccgtacagacgcaaaagtgccaccgcaaacccgagcgacagcccaagaataaaagagatcagcgttaagggaatggtgaatttcagccccgcggaaagcattggccagaaagaatcaatcgctaagggtaaccatgttggcactgcacaccttccggacatagcatcttgccagaaattgctggcggaatattttattagcccggcttaattatttgggggccggattagtgagaattatattctttgcgccgtgtgcgaaaacaaatatatacgaataacgttatatagaaaaaagctaagccattcttttttgatacaaacccgccgtcgttacctgccgttttattgcatcatttacgtgaaattttgccattaatgcaccatttttgatcgatttggcatgaaatggaaacgtccagacgctgtttctatgaacaaaagtgtttcgttggaaacgtcgctggatcaccaaacggaaaacttttttgcatacggtaaaaatgacggtattggtttttatcagtaagaaaaaactaatataagacatggtgttatgggatgtgtacataacgaagcactgatgggaaccggctgcctgcgaacgtcaggcaaccgctgcaacattttctgaaagccagagagaaaaaccagggcgccggggaatcgttaagctggtggataagttgctgctttcagagggatttttggccgaataccgcctgcgccatctccacgaaccctgcgccgccggggccgagcgttacccagcggggggcaacggggaggtgatccagatactgccggacggtgctgacgcctaccgtgtgtttgaaaaaagcgaacatcggcgcgtcgttggttgaatcgccgctgtagagaatagcttcccgctcccgatcgatatcgacgccgtagtgctgagccagagtacggcgcgtcatggtcagcttgtcgtagccacccagccagcccagcacccacagattgttgacggtagcgtcggcacccgcctgccgcagcgtgttgacgatgcggcgctccagtaccgggtcggcaggccgcgcgaaggccaggctggtcaggcggaagggctgatcgtccgccagacgggcttccggtagcgctgccaggacccggtcggcgatggtccgcagccgggcggcgacggatgccgtggcgtcgtccgcgtgccagtaatgatgctcgatgccatgcccgtccgcggtgcggcggaaaaaaagcccgccgttttcgccaatgacgccgtcaacaggccacatccgcgccatctgatcgcaccagcccgccggcgcggcggtgaccgggatcacccgtatcccggcggactgcaattgttcaagcgaggtataggcggcggccgacaaacggccctgccaggtgagcgtttcatccatatcggtgaggacaaaacgtactggctcgaattcattagcgggagcatcggataaagcgcgcatagggaaccttaaacatcatgatttaataacggaagtgttacgttaattcctcataatcaatagctaaaaatcagttatgctttgcaataaattcgctataaattttccctcattgtccaactgaacggtggcgttaatgactccctttttcaccccgcctcattttcgtaccatcgcgaacgagccgctctggcgaggggggacgcatcgatcgtattcgccgggtgtggttgattgtcgaatgtgttgatttaaaagtatttactctttttagctattcaaagtctatatggttatttgtttttaatgtgggtaatgcataaaagtgaggtgacgcaaaaaagatttatcgatgcgattttaagaaggatattattatgccggaagcgggtgaattgtatctcatgccgaaaagagaaaataactggcatttaaataatgtcgtcgatgaactccgtcgcgttcgtcaggcgtggcgcgatgaacatgcgaaaaataattatcgtaataaacgtagtttaccttcccgggaaagcgttaattcagtcaccgataccttgataaaagtgctttatccgatgcgattaggtgatattgaattacgcaaagagggcgaagattattacgtcggtcatttactaggcacctcgcttgaccgattgactgaagaagcggtcctggaactttattatcagtcagatgagcaggatgcgagtcacacgctgtcgcaggaggcggtcaggcgggttcagcagtttgccaaccgtttgccggtcatccgtcagcgtctcgatcgcgatatcctcgcggcgtatcagggagatccttccgcgcgcagcatggatgaggttctgctctgctatccgggaattcacgccgtgatgcactatcgtcttgcccacgagctgcatcagctcggtctgcctctgctggcgcgaatgatatctgaaaaagcgcacagccagaccggaatagatattcatcccggcgcgcagattgatgacggattctttatcgatcacggaaccggcgtggtgattggtgaaacggccatcgtcggtaaacgcgtgcgtatttaccaggcggttacccttggggccaaacgatttattgccggcgatgacgggcagttgcaaaaaaactatcctcgccatccaatcattgaagatgatgtcgttatttacgccggcgcaacaatattagggcgaattactatcggcgcgcgttccagcattggcggaaatatatggctgacccgtgatgttccgccggatagtcatgtgcagcaggcccgggtacagcaaaaacatttcagcgacggtgacggaatttaattccgccgataataaaatgaaatgaccagcgcatcggaataaataaaataacagcgtgataatcattatgaatttacttgaaacgatcggcgctactccgttaatcacgttaccctcttttgccgccgagctacctggcgtaacgctgctggcaaaagcagagtttatgaaccccagtggctcggtgaaagaccgcgcggcgaaagcgatggtgctggacgggattgctcgagggttattaacgccgggtaaaacgattattgatgcgaccagcggtaataccggcattgcctacgcgatgattggcgcggcgctgggatatcacgtccggctatatctgccgcagaataccagcccggagcgcaaacgtattattcgtcattatggcgccacgattgtggagaccgatccgctggaaggttctgacggcgcctatattgaagttcaggcacaagttgctgcgcatccggaacgttatttttatccggaccaatataacaaccccgtcaatccgaatacgcatttcgcaacgaccggaaaagagatttgggagcagagcgggcaacagatcacccattttgttgccggtatgggcacctccggcagcttcgtcggcaccgcgcggcggcttaaatatgaaaatccgcgcgtgaaaacgctcgccgtacagcccgcttcgccattccacggcattgaagggaccaagcatatggggagcagcattaaacctggcattctcgacgaaaccctgttcgacgacgttattcccgtcaccaccgaggaggcttatgcgagcacgcggcgcctcgcccggcgggacggcatttttgtcggcatttcctctggcgctaatgtcgccgccgccgcgcggctggcccgcacgctgccggcgggatcggtggtggtcacgctgctgtgtgatgtcggctcgcgttatctgactgacgctttctggaatgaaacccatgattgaattaactcaagaaatcaccaggctgattggcgctgaaggggaaaaggcctatcccaacgaatgctgcggtgcgctctttggccacttttacgcgcagggcgatgcccgcgtgacggcgattttccccattgttaatgctcgcgagtcggaggagcagtaccaccgttttgtcatcaccgccgatgactccctgcgggcggaacgcgctgcgctggctcaggatgtggacgtgatcggctattaccattcgcaccccgatcacccggccattccatctgaatttgatcgcgaacatgcgctgccgttttacgcctatatcatcgtggcggtcgcgcagcgcgaggcgggggcactgaccagctggcggctgacccaggaccgccagcgctttttgcaggaggacgtgcagatcgttttataacgtgaataacgggcacaacgttgccggaaaccagaacaaaacgcggagagattaccactatggcatcgacattactgattcccactgcgctacgcgccttcaccgacggtcaggggaaagtgatcctcgaaggccacaccgttgggcagctggtcgcagcgctggcggagcgatttcctgacattcagccgcatctgtatgacgatacgggcgcgctgcgcagtttcatcaatctttacgtgggagagaacaacattaaaaccaccggcgggctggagactccggttagcgatggggcggaagtgctgctggttcccgccattgccggcggcgtcgggaaggcgatatgagcagaccgagcattatcccgggtgaccgtctgacggagctgacgcatgcggaaattgcccgctacagccgccacctgctgctgccggaagtcgggcttgaggggcaaaagcggctgaaggctgcccgcgtattgcttatcggcaccggcgggttgggggcgccggtggcgctttatctggctgcggcgggggtcggtaagctggggattgtcgattttgattttgtcgacgtctccaacctgcaaaggcagatcattcacaacaccaaagatatcaaccgacccaaagtggcttcggcgaaagacaagattaaagccatcaaccccgagatacaggtggtgacctataacaccaccctgagcagcaaaaacgcgctcgaaattattggggaatatgacctcgtcgtcgacggtacggataattatcccacccgttatctgatcaacgacgcctgcgttttgctgggtaaaccgctggtctatggctccattttccagttcgaagggcaggccagcgtcttttatgccggggaaggcccgtgctaccggtgtctttatcccgagcccccgccgccggggctggtaccttcctgtgccgaaggcggcgttgtcggcgtgctgccggggattatcggcaccattcaggcggcggaagcgatcaaactaatcgtcggcggcagcgagagcctgattggccgcctgttgctcttcgatgtgtggcagatgaagcaacgcgagctgcggctggagagggctcccgactgcccggtatgcggtgagcatccctcgattcatgcgctcatcgactacgaggagttttgcgggctgaaacctgatgaagcagaagttccggttgaaagcgtcacggcgcttgagcttcacgcctggatagaggagggaagacccctgcagctgatcgacattcgtgaaccccacgaaagggcgattgcaaaatttccgcaggcaaaagtgatgccgctgggccagatagtcagacgtatcggtgaattcgacccgacggtcgatgcggtatttctgtgcaagatagggcagcgcagtattttcgccattcgggcactccagcgcgcaggttatcaggggcgcgtgatgaatttaaaagatggcctaaacgcctgggcacgggatgtcgatacccgtttgccgcagtactaaccttcagctccactctttcaaacactaaggaatcattatggcagaacaaaaaggcattaatgcactggggcgtgaagccgcgtatcagttagcgaacgtgaccaaaacggcaccgcaatttgcggcaatcaccccgcgctgggtcagccgttttctcgattataagggcctggaatcgggaatttaccgggtgaacaaggtcgtggagggggagacgccgctggatgtattatgcagccaggatccgtcgcgcgttgaaataccccagggctatatcgagtatcagaccacgccgcgtgaataccagctggattcgattacgaccattataaacgtcgataccaaaatcgccgatctctacagctcgccctacgaccaggcctcagagcaaatcgcgctggcgattgaaagcctgcgcgagcgccaggaaagtcagctgatcaataacgatgaatatggattgctgaaaaatatcgacgactcgcagcgtattcagacccgcaatggccgtccaacgccggatgacctggatgagctgttgtccaaagtctggaaggagccctccttctttctggcccatccgcgcgcgattgccgcatttcagcgtgaggctacgcgacgcggcgtgccgccggtcaccgtgaatttgcatgggggcacgtttatcctgtggcgcggtattccgctgatcccttccgacaagctgtttgtcgatggtctgaaaaacccgaaaggccagggcggaaaaaccaatatcctgttgattcgttccggtgaaagcaaacgcggcgtgctgggtctttatcaggaagggctgccaaacgaacagtctcgcggtttgtcggtgcgcttccgggggatcgacgataacggcgtggcttcctatttactctcactttattgctccgctgcgatcctggccgatgacgccattgccgtgctggaggatgttgaagtgggtgaatattatgactacgagtaatttattcacgcttccctatgcgcccggcggatgggcgggcgacgcgccctccgcgcgtgattatggtctgcccgatgcgcgcgatctgcaggggctacctgacgacgcgcccgcacgcccgcgtgcgaccgaagccgcttacgcgccgcgggtgctgccattgggccaggagagcagggcggatattgcgcctcgcggattcgcgccgttacccccttccagcgtaaaaacggcgccgccggcgcgggttggacagatcccggtagaacgtatccgcgctgatttcccgatccttagcgaacaggtggacggacatccgctggtgtggctggataatgccgcgacgacccagcgcccgaagcaggttatcgatcgtatcagccactattatttacatgagaattcgaacgttcatcgggcggcgcatacgcttgccgctcgttccaccgatgcttatgaagccgcgcgtgagaaagtgtcgcgttttatcggcgcccgcggcccggaaaatatcatcttcgtgcgcggaaccacggaagggctcaatctgatagcgcacagctacgtgaagccgctattacgaccgggggatgaaattatcctgacgttgcttgagcatcacgccaatattgtaccgtggcagcttattgcccaggaaacgggcgcgacgatccgcgttgcgccggttgatgagcacggtcagctgatcgttgaggaatatatccggttgttcaacgataagacccgctttgtctccgcgacccacgtttctaacgcgctgggtaccgtcacgccggttcaggagctggtgcagatcgcccatcgttttggggtgcgcattgccatcgacggcgcgcagtctatttcgcatatcccgaccaacgtgacggcgctggatgccgatttcttcgtcttctccggccataaaatttttgggccgaccgggatcggcgtggtctatggcaagcaggaggtgctggaagaggcgcgtccttatcagggcggcgggaacatgattgccgacgtgacctttgaactgacgcgctatcagccctcgccgaataagtttgaggcggggacgggcaatattgctgatgccgtcgggctgggggcggctatcgattatgtcacctcgctggggatagaaaacattgcgcagtacgagcacgccttactggagtatggcatcgagaagctgtcggctattccgggcctgacgctggtcggtaccgcggcgaacaaaaccagcgtcttatctttcgtgctggcgggtcatgaaaatgcagccgtggggcgctatctcagtcaggtcggcattgccgtacgatccggacatcactgcgcgcaaccgatcctgcgccactttggttatgagagtaccgtccggccttcgctggctttttataatacgccgcaggaaattgattttctcgcagagcatgttgcaaggtttgcttcgcggtagcggtgtcaagcacgccagggatggaccatgacgacaatcccacaagcccgctgatttccccgcgggcttttatcatatcgtggtaaggataaggcgtgttgccgcgacttcggcaacacggcgagccagcctgaaaggcgccagcggacgttttaatggggggcgcagtagctgcctgaatgaatgtggggttaacgctgcatcccccagcgcttaattgtgatcttttccagactggcgaatacgatgccttccaccagcagaccaatcgcgatgaccgttaacagccctgcaaatacccggtcggtgaacagctcattgcgattctggaatatataccagcccagacccccttcgccgctggaggcgccaaataccagttcggcggcaatcagcgttcgccaggcgaaagcccagcctattttcaaaccggaaaggatggcgggcaacgatgccggaataagaatcgtgatcacatagcgtggccctcggaggccatagttgcgcccggccatgcgcagcgtttccggcacgctgctaaatccggaccaggtattcagagcgatgggccacatgacggaatgtatcagtacaaatatcaggctggcatttcccaggccaaaccacagcagagccagcggcagcagcgcaattgccggcagtggattgagcatcgcggttaatgtgctgagcagatcgcgaccaaactgcgtggttactgccagggcgctggcaatcagcgccagcgcgctgccggccagatatcctttcagcagggtactgagtgaattgacgattttttccggcagttcgccattgcgcaggtcttcactgaacgcctgcagcgtctgaaataccccgggcagcatcagatcgttttgctgtattcgcgcggcgatctcccatagcgccagcaccagggcgacaatcacagacttacgcagccatgcctgattccacaggcgctggcttaagggtagcggcgtttccaccggcagattacgtagcggcggtaattcgcgttcgaattcaggacggatgtacggtggctgggacatacgctggctcctcgccggatgagtgagacggaccgttgccggtcgtcgggaataacagatggtgaatatgacgagccgcgtgttgaaacgcctcgctgccgaaatcattaagcgtgaactgatgacaattaagctctgcccggacgcgccctggatgcggcgaaagcaccagaatacggctgcctacgaccagcgcctcttcaatcgagtgggtgacgaaaagcagcgtaaagcgctcttcttcccagagcgtcagcaactcttcctgcatcgtgcgccgcgtcagcgcatccagggcggcgaagggttcgtccatcagcaggatgcgcggtttcatcgccagcgcacgggcgatggcgacgcgctgcttcatgccgccggagagcgtatggggcatcgcgtcagcaaattccgccagaccgactttgtgaaggaaatgcagcgccgtctcttttgcctgtgagcggctggctttgcggctggcgagcagaggaaacatgacgttttccagcaccgttttccacggcggcagctggtcgaactcctggaataccatcatgcggtccggagcgggggcgctaactggcgtccctgcaagcgaaatttgaccgctgcgcggggcaataaaaccgcctgcggctttcaacaggctcgattttccgcagcctgaggggccaagcagaataaagcggtccccaggccagacatcaaaactgacatcgtgcgtcgcgcgtacccggcgttcacgcgtgcggtattcaatatcgacatggctgacctgcagcagcgggccatcaatttgctgattgaccatcatagcctccagtatcgcggtttagctgccggggttttcccatgcttcgttaaaaaaataatctttccacgagccggccttatttttcagtatcccaagctcatggagtttttcggcatatacgccagtacgttcaggggaaaccgtaaagcttatttcgggatcgttaacaattttttgtaccagcggtaaaggcagccgcgatttctcaacgcgaatgtaagtttcggcagcggcatttttgtcacggttaataatacttgcggcttcgctgagcgcgcgataaaacgctttataggttctggggttttcatcatggaatttctgggtggtatagagaacattaaaggttgcctgtccccccagtacgtcataggagctgagcactttatgcacgtttttatgttccagcgcctgatactggaagggcgggcttgagaagtgggtggtaatctccgatccgccggcaattaatgccgcgctggcgtccggatgcggtaaactgacgctaattttatcgaagcgtttgaagtccccgtcaccatataatttcgcggtctcgatttgtaatgtccgagactgaaaaccgacgcctgctgccggtacggcgatccgatcttttgcggatagatctttaatgctttttaccgccggattattactcaacaaataattgggcatcgaccccagcgaggcaatcgctttcacattttgcttacctttggtgcgatcccatagggtgagtacgggaggaaccccggctgacgcaacgtccagagcgccagagagcagggcctcattcatcccggtcactccggaaatggtgcgccactctacttttatatccagcccctctttctgaccctctttttcgataagccgttggtcacgtaccacatcaagaattaaatagccgatgccaaattgctgcgcaatactaatgtttccttccgctaatgccggctggcttatcccgcccagggcggaaagcgccagcgtacaggcgagtattctgcttgttttattcatttcagtttcccagaaaggtgtttctcagccaaaaatcatgggcagaggcgagcgggaaaggaagtgatttaaatgaaaatgaatatcagagaaatgaataacgatatttgtggcttgttatttaccaggcggaaaagcttagtcattattcatgtttaggtcataaatatattctcagtatagtcgggttcatcttttaaatagcccttatcaatgtaggggcagtcattgcgagcctcatcatgcctttattttcggatcattatttacgttcgcttttgcagcgccatctggtaagggttggcaccggacctgatatcgctcaaaaggtcgcggataacctggtcgaagcctcactaaaaggccacgactctcatggcgtgaccctgttaccgcgctatattcgggccattctggcaggggatttgaaccctggcgccacgctcaccatgttgtctgatgccggaccgatcgtctcttttgatggggggcacggcttcggccaggcgttaggcgaacaggccatggccgtgggtattgagcgtgcgcgcgagtttggggtggcaataatcggattgtctaatacccaccatcttggacgaatcggcgcatgggcggaacaggcggcggacgccggactggtctcgctccattttgccaacgtggccgcgccgtcggtcgtactgcctttcgatggactcggtgcccgactcggcacaaatcctttttgtgtcggggtaccgctcgcgaaccggcccccggttatccttgacttcgcaaccagcgccatagcaggcaataaagcgcgcatcgcatggaatgaagggcgagccatccctgaaggatgtgcggtagatgcgaacggacaacccaccaccgaccctgcggtattaatgacggaaccgttcggtgccttgctgccttttggcgggcataaaggcgcaggattgtcgctgatttgtagtctactcggcgctgcgctgaccggcggcgaaaccgaaagccagcaaattccgccacgtgccggaatcatcaacaatatgctgtcgattttatttgatcctgcgcgactgggggtgcaggagagttaccagcaggcgctattagcgcaggtggactgggtgcgtagcgggcaggaagggcgcaatgtgcagatccccggagagccggaattgcgcgcgtatacccgccgtcagcaagagggtatctggatcgatgaggtgagctggcaggcgtttgtcgccctggaagcattaaatacctgaggttgtctgcctggttaaatacgtctttgggttatctgttcgaagcgttggtattatgtccggttaattagtgctgatgaacaaaataaataaaagcactattttatctttttttctcataaccatagctgaaaaacttggtaagtcatcagtgagaaaataaatatagtcatacttaatattgtatgaaccttttatcctcgcggccaaattttaatttgctgcatagtcattttttacaggagttattatgcatctggcgcgtttcccccggcttcattttggccacttcccgacccctctggagcctctcacgcagctttcacgcttgctggaggggccaaatatctggataaaacgagacgattgcacaggcctcgccactggcggcaataaaacccgcaaacttgagtttttgctgggcgatgcccaggcaaaacaggcggatattatcattacccagggcgccacgcagtctaaccatgtgcgtcagaccgtcgcggcggcagccagactgggtctggaaacgcatatttttctcgaacaacgcgtcacgacgctgggtgatgagtatcagcaatccggcaatgtgctgctggacggtttactcggcggcaaaattatcgctcatcttcccggcggtacggatatgcagcaggcaatggaacaacacgcggaaagcctgcgagccaggggccacaccccttatgtcatccccggtggaggctcgaacgctatcggcgcgctgggctacgtctcctgcgcggaagaactgctttggcagtccagccagctacggctgcgcatcgatcatatcgttcatgccaccggtagcgcaggtacacaggctggcctgattgcgggcttaactgccacgcacagcggtattcctctcctcgggattagcgtccgcgctccgcgcgaaaaacaggagcacaacgtctggcgtctggcgcagcagacgcgggaactgctcggtgtaccgggtgaattgccgcgtgaggcggtggtggcgaacagtgattatgtcggcgaaggctatggcttgcccaccgaagggatgcttgaggcgctgcagttgctggcgcagcacgaggggattctgctcgaccccgtctattccggaaaaggcatggccggattgattgatctgatccgtaaaggtcatttccgcagggatgagaatgtggtgtttatccatacggggggaagtgcaggtctgtttggctaccgtcaggtcatcgccgattatttgccatcatgagtacaccatttctgctgggaattcttggcggcatggggccgctggcgacgctggatctgatgcataaattgctgcgggcaacgcccgccagcagcgaccaacagcaaattccccatgtggtatggaatgtgccgcaaattgcggatcgccagcgggcgctggcgggaacggggccatccccgctgccgcagttgttgtacggtgtggaacagctgaaccgcgtgggcgtcagtcatattgccattgcctgtaatacggcgcaccactggtatgaggcgctggcgcagcatagcgacgcaccgttgctgcatattgtggatgccacgctggcggtattcgacgggaaagagaaaccccggcgggtcgggattatcgctacccagggcacgctggatgccggttggtttcagcacggattcaccgcgatggggatcgaaagcgtacagccaacgcaagaagaactgcggcagtggtttgtaccgggatgctatgcggtaaaacgcggcgaactgcgtaccggcggagaactgctgagtctacaggcccaggcattgcgcgatcgtggcgcagagcggctggtgctggcctgtacagaagtgccggttgcgctggctgaggtgacctcaccgcatctggccgtgtcaattgatcccgcagaagcgctcgcccggcagtgtgcccggctatggctggcgcaacgcgagacatggcattaaaaacgttgttatttaaaggataaattaaatgaataaaagtctctgtgtcttacttgcagcgggtggcctgtgggttaatagcagctttgccgaaacgccagcggaagttcgggtggcatatagcggcggttctcaggtgctgatgctggctaaggccgatggttctttggataaggcactcaacagcaaggtgaaatgggtgcaatttgcgtccggtgctgatgcgttaaattactttgccagcaatgcgattgatattgctaattttggatccagcccggcaacggcaggcattgtcagaaaactgccggtggaaattatcggcgtctctggcgtgattgccagctacgagcgtttaattggtaaagacggtattgccagcattaaagatattgagggtaaacgcgtagcctatccgccaaactcgacggcgcaatatgcgcttgaggccgctatcagcgttaaccatctcgaccgcagtaaaataacattattgccgctgcgtccggcggaaatggtcgcagcctggaaacgcggtgatatcgacgcgggctatgtctgggcgccgtttgctcaggaactggagacttctggcgggcatcaggtgttcgcaaccaaagatctgcaaaaagatggttacctgatttataacaactacgttgtgcgtaaagcttttgctgagcagtacccgcaaaccgtcagcgcgttcctgcgtgttcatcagcaaaaagtcgatgagtttaagaaagacccggagcgcgcggcggccattgttgcgaaagaggtgggtgcgccggtgacgaccgccgtcaatacgttgggtgggctggaatatcccacgctgagccagcagggtacggcgcaatggttgggtaacggtacgcaaaccaccgacagcgggattgggaaagcgctgaccaaaacctctcacttccttgctgatatcggtgagattcgccaacgtgatatcccggccagctgggacagcgccattaactcccgttatatccgtgacgcagcggtagccgcgcaatgagattgagttatcacattgccatcagcgtcgtttcggtcactgttttctttatcgtctggcaggtggcggcctcgcggcaatgggttgatccgctgctgctgccatcgctaacggatataggcctgacgaccgaagagttgctggcggatggttatcgtcaggtgccgctgtgggagcatgttgccgtcagcctggcacgtgcgttaagcgctttttctgtggcaatcatcatcggtattcctctgggattattgatggggctgtcggaaggtctggcggcggtgctgaatccgtttgtgcagtttttgcgcccgctgcccaaaattgcccttattccgctggcggtcgtctggctggggattggtgaggcctcgaagttctttctcatctttattgccactttccttagcgtggtagtgggggcatctgctgcggtagagcgtattggtcgttcgcgcattcgtgtggcgcaaacgcttggtgcttcacgcaaacagatctttctgcgcgtggtgttaccggatacgttaccggaactgttcaccaccgtcaggctgtcgattggcattggctggacgtcgcttatcgcggcggagatggttgctgccagttcggggctgggttggatggtcattaacgccagttcctatttacgcaccgatatcgtcatgcttggcattttgctactgggtggcattggctatgcgctggatttactgctgctggggctgcagcgcctgtttgtaccctgggcggggaaagaataatgagtgctatcacgctggaaaacgtatcgctcgcctttgcggcgaagccacagccgttcacggtgctggaagatatcagcctgtcgctccacaaaggggaatttgtggtgctcctggggccttccggctgcggtaagtccactattcttaacctggtcgccgggtttaacaaaccggatcgggggcgcgtggtggcgggggggaaaccggtccgccagccggggccggatcgcggaatgatcttccagcagcctaacctctttccgtggctatcggtactggataacgtcacctttggtcctcggctgggtaagcatcgcaaagatgaaattaacgcccgtgcgatggaatggcttggactcgttggcctgcaaggctttgagcaccattcgccctggcagctttcaggcggtatgaaacagcgggtagcgctggcgcgcgcctggctacccggcccggatgtgctgttactggatgaacccttcggcgcgctcgatgcgcaaacccgtctgatgatgcaggaactgctgcgtgaggcctggctcaataccggcaccactctgctttttgtcactcacgacgtggaagaggcgctattcctcgccgatcgcattctgattatgtcagcaaacccaggaaagattgttgaggagatcgccctgccttttggccgggaacgtgatatcgagaatctgtctgaacacccggattacagtgggatcaaacatcatgtactgcaccgggtgcgtaaggaggctaaacgccatttaggttgaaaacggctgcagcaagcaaaggggttatttccgaacttatcatatcgtggttcccggttgttctggtcatatcgaatgaccagacgggcagcgatcgcgtctggccctgcttcggcgaaagtctgcaccgtctaccccaaaagctgagcttacagcattgccgataatcttttttaactgccattaaaaccgatgctggcgcgatttttagcgccagcatcgccttcagacggtagtccccgatgatccgttccggccttttatatttgtcaggtttgctactgcaacaattcggcaaatttcgccagccattgcggatgagcgggccaggcgggggcggtcaccagattgccatccacatgcgcctgatcgataccgatgtcggcaaaatgtccgccgctgagccgcacttccggcgcgcaggccggataggcgctgcaggtgcggccttttaatacccccgcagctgccaacagctgagggccgtggcaaacggcagcaataggtttacgcgctgcgtcaaatgcctgcaccagtttaatcacttgcgcattcaggcgcagatattctggcgcccggccgccggggattaacagcgcgtcgtaatcctgttctttcaccgttgtaaaatcggcgttgagaacaaagcggtgcccgggtttctcactgtaggtctgggcgccgtcaaaatcatggatcgcggtcataatgaagtcgccttttgttttatctggacagaccgcatcaacctgatgaccgatcatttgtaatgcctgaaacggcaccatagtttcgtaatcttcggcgtaatcgcccaccagcatcagaatctttttgcccatcttattcactcctgtatgaagaaaggtgtctaagatatagcctggcgggagagggaatgcgaacctgtggatgagggacggctggcggggcatgccgatctggcggcgatgcggcaaatgaatccgcagctgcaatccattgagtcctggccggcgggaacaggacgcgtcgctttcgaacgggcgctggcaatctctgccggccgggcctttaagcggtaaacccgctttacccggcgccaggcaggaattaatgagcgagaggtattattgtaagctctgttttaatatatctgctgaatgaaatgccgctatttcttttgcgctcagcgcgactctatacgttgtccggtttaaccatcgataccggatatttggcaagtattatttgtaagttttatattaatcctgtcagccattaattatagccatattaaaatccactactggacttttttatggccggtaaaggataaaaaataatttatttcttacgcccctgttcgcgcgcgtttcagtatccggaacgaccagtatttgcgttacatattgatttgcatcaatcaacgctgcctattcagatatgaatttaattcacattcctctgtcaggtatacatcctgcctttattgtaagaaaagagttgttattacataccagctttgtttgtctcatgcgtttcatttttacatttgccttaagatgcctgaggaaagtcttataatggactttgcaaccggcaggttgatattttttggcgctttgctctactatatccgggtcttcacacaccgttatctttaacacattattcctcacgggaagggactgctatggctgatacgttccagaatgaggtgcccaaggcacgcattaatttaaagctggctctgcacacaggaggcgcgcagaagaaagtcgagctgccgctgaaactcctcaccatcggtgatttcagtaatggcaaagaagaccggccattatcggaaagagcaaaaatcaacgtcaataaaaataacttcaacagcgtactttcggaattcagcccggaaatcagcctcacggtacagaacacgctggccggtgatagcgccgaagaaaatattcagctccgcttcgccgatatgaaagatttcgaaccggagcaggtggcccgccagatcccccagctccgcgccatgctggcgatgcggaatttattacgcgacctcaaatccaacctccttgataacgccactttcagaaaagagcttgagaaaatcctgaaagacccggcgctgacgcaggaattacgcgacgaaatgagcgcgctggccccgaaataaacggcgtgcgttatttaatggattaaccgggaatatgctgatgtctgtaaatactgaaaccgcccccgcgcaggggcagaccgctgtactggaaaaagagagcgtttacgcttccctgtttgacaaaatcaacctgaccccggcgtcccgcctgggcgatattaacgactttctggatgatgccgcgctgtccgacgccccggcgggcgaacgactgacggcggcgatgcaggtgtttatggactgcatccgtcagtccagaaagaccgtggagaagctcgacaagaccctgattgaccaccatatcgctgaactggactatcaaatcagccgccagctggacgcggtgatgcaccatcctgagttccagaaggtggaatccctgtggcgcggcctgaagcagctggtggacagcaccgactaccgccagaacgtcaaaaccgaaattctggatgtctccaaagacgatctgcgccaggacttcgaagacgcgccggagctgattcagagcggtctctactggcacacctacaccgccgagtacgacaccccgggcggcgagccgattggctcggtgatctccgcgtatgagttcgacgccagcccgcaggacgtggcgctgctgcgcaacatctccggcgtctccgccgcggcgcatatgccgtttatcggcgccgtcggcccggccttctttctgaaagagtccatggaagaggttgccgccatcaaggatatcggcaactacttcgaccgcgccgagtacatcaaatggaaatcctttcgcgacaccgacgacgcgcgctatatcggcctggtgatgccgcgcgtgctgggccgcctgccgtatggtccggacaccgtgccggtgcgcagcttcaactacgtcgagcaggtgaaaggcccggaccatgagaaatacctgtggaccagcgcctcgttctccttcgcgtccaatatggtgaaaagctttattaataacggctggtgcgtgcagatccgtggcccgcaggcgggcggagcggtgaaagatctgccgatccacctctacgatctgggcacaggcaaccaggtgaagatcccgtcggaggtgatgatcccggaaacccgcgagtttgagttcgccagcctcggctttatcccgctgtcgtactacaaaaaccgcgactatgcctgcttcttctcggccaactccgcccagaagccggcgctgtacgacaccgccgacgccaccgccaacagccgcatcaacgcccgtctgccgtatatcttcctgctgtcgcgtattgcgcactacctgaagctcgttcagcgtgaaaacatcggcaccaccaaggatcgccgcctgctggagctggagctcaacacctgggtgcgcggtctggtgacggagatgaccgacccgggcgacgagctgcaggcctcacacccgctgcgcgacgcgaaggtggtggtggaagatatcgaggacaatccgggcttcttccgggtgaagctgtacgcggtgccgcacttccaggtggaagggatggacgtgaacctgtctctggtttctcagatgccgaaagcgaaagcgtaaggcgggggcagggatgaaaacagtacgaccgctgtgggggcggggccagatggtttcccctcaacattttcagcaggaggccgcgcaagcggcctggcacacagagtgtgtcgcccgactgggagcaatacatccctggggggttgcgcggacggcttttgacgccgcgctgctgaaacaggggaaactgaaggccgaccacctgtgcgtgcgtttcgctgacggaacgctcactgatagcgataacgccgatgcgttgccgcccgtgatgaccttaccggaaacagaaagccacgaactgacggtggttttggcgctgccccatgagtatgaaaacggcggcaactgcctgcaaccggagcagaaagcggagcgtcctgtgcgctggcgtctggcctggcgggaggtgcgtaaccgctatggggatgacagccgccagattgcggtaatgcagccggagctgacgctgcgtacagacgataacgacaacggcaattaccagaccgtcgccgtggcccgtcttaagcgcgacagccagggaaactggtcgcaggacgcgtcgtttatcccgccgctgctgaacgtgcaggccagccgctggctaacggagcagaccgaatatctgacgggtcagctacgcgcgcgcctgcagcgcctgatgtctatgcgccgggagagcaacgaacggatggccgacttcgcggtggcggacgtgtcgctgttctggctgctgaatgcgctcaacagcgctgagccggtgctcagccatttggtgcgctatccgcaggtacacccggagcggctttatcaggcgctggccggtcttgcaggcagcctgctgacgttttctcttgatcacaccaccgccgatattccggcctatcgtcatgagcagctaacggcggtcttcccgccgttgtttgacctgctgggtgtgctgctggaagccagcctgccgtcgcgggtcgtggcgattgacatggtccgcgatgagcggcgcaagcgctggcacgcccgtctccacgatccgagactgcgtgaagaggcggatttttatctctcggtacgctcgccgctgccggtagcgcaactgctggagcagtttccgcttcagtgcaaagcgggtagcccggatgaagtcgacagggtggtcaatggttcccagcccggcattcctttgcgcgcgatgagccacgtccctgcggctatcccgctgcgcctggaaaaccagtatttcacccttgatatggcccatccggcggcgcgggcgatgctgctggaaggcagttgtgtcttttacgtccccggtctgctgggcgatccggaacttgaactgtttgcggtgctgcgctcatgaaacaggacataaatatcgacgccctgatggcggacgcgtggctgacggtgacagaactgcggttcggcgcaagactggccgacggggagggcgaccgcctgtggcgacattgtgtagatcatattgaacaggtgatggcgaagctcgaggctgcggacgtcagcgaggcgagccgtcggcatattctctacgcctggtgtgcgctgctggatgagaccgccaaagggcgcgaaggcgaggatgatgcctgcatcgtctggtatgaccgtccgctgcaggcgaaatactttggtgctctggacgccggagacgcgttgtatgaacggatgcgacaggttctgcgcgagcccgcgccggatatggcggtgctgacctgtttccaccgggtgctgatgctcggctttaaagggtgttatgccctgaatgaaccggctcgtgaccagcttgttcgggtactgaccgagcgcgtgccgccgtttgaaacggaccagagccgtcccgtactggcgggtatctccgggcgcagcggcctggcggacgggttacgtcgctggccggtttgcatcgggctgtcgctggtagcgatcgccgcgctgtggtggggtctgaaccactggcttgattccctgattgcaaccctgctgccgggggccgggaaatgaacgtgcgctatttgcgcctgttatggctctggggcgggatcctggcgctgctgctctgcctgctgtttctgccgctggcctccggcggacggattctggccgctgcgctgatactggccgccgttatcgccgggctgattttcgccgggcgcaggcgggaagatccgctggtagataacgcctggctggatgagataccggacgcgccgtatcgcctgccggtggtgctggtctgcggtgatatcgccgggtggccggagagcgggccagtttaccgcacggcacggggctgctggttaaacgtcccgacggctgaactgcagcagacggtacgtattcttctgtggaaacgcccggacctcgtatcgcagctggcggtgatggtcagcgtctgtccgcagctgcatcgtgatgaggcggcgctggcggccgggctttatgagctgcgctggcagctgagccaggtgcggagcgattgccgccgggcggtgcctttactgttgaacagtaaggtggtgggggcgtctgttccacaaccgctgtggcagacagcgcaggccggggaggccatgcaggtatggctggcggacgatgtgccgtgcagcaccgggacatggctggcgcaaaaggacgggacggaccgcctggctgcgcaggtgaggatgaatacgctggttcgcctgactgaacaaacaatgatggccgcgctgacggcggcgtcggacgatatgcctccggcggacccggcgatggtggtatatcacatgacgccttcgggggcgccggttctggctgatagcctgtggcagcgctggttgtctcaacatactgccctgaattcgctgcccggctggcagcccgaaccctcatcagcggatgtcacgctgccgaattttattctgccgctgttgccactgggcgccggcgtgacgccgctcagcagaactttacggcgggcattctgcctgttcacccttgccgccatcatcgcactgtgcgccagcgcgtggaacaaccgccagctgctgcagcgggtggggttcgatattcagcattacgcgcagattgcgatggatgactacgccccgaaagcccgcgccgtgcagatcctgcgcggggatgcgctgcagctggatcggtgggcgcgccacggtgaaccgctggaaatggggctcggcctgtatcacggggagcatttgcgcatgccggtgcttgacgccattcgttcctatgtcccgccgcctccgccactgaagcctgccgagaaaaccgcgccgaaaatcatccgcctcgacagcatgtcgctgttcgacaccggcaggtgggtgctgaagcccggctcgacaaagctgctggtgaactcgctggtcggcattaaagcgaagcccggctggctgattgtggtggcgggccataccgacagcaccggcgacgataaatccaaccagatactttcgcttaagcgtgccgaatcggtgcgcgactggatgcgcgacaccggcgacgtgccggagagctgttttgcggtgcagggctacggcgagagccgacccgttgcccccaacgacacggccgaaggccgggcgctgaaccgccgtgtcgaaatcagtctggtgccgcaggcgaatgcctgccagccaccgggcatgacccccgcgccatcgcaggatgatggcgctttttaaaatgatacacacagtcattcgggctgcctcgcagcggcaactgaatgggtccccggaagcatagttcactatgtgaccggggcaaatgaaggcagccaacaaagaggcagcctgaaggacgacgtgtataaatggagaagtaatatggcaattccagtctatctgtggctgaaggacgacggcggcgcggacatcaaaggttccgtggacgtgaaggaccgcgagggcagcatcgaggtggtggcgcaggagcataacctgtacatcccgaccgacaacaacaccgggaagctgaccggcacgcgtatccacacgccgttcttgttcaccaaggaaatcgacgcctccagcccgtacctgtacaaggcggtgaccaccggccagacgctgaagtcggcggagttccgctggtacaaaatcaacgacgccggtcaggaagtggagtacttcaacacgaagcttgagaacgtgaaggtggtgaaggtcaacccgctgatgcacgacgtcaaggacccgtcctacgagaagcataaccacctcgagcagattgagctgcgttacgaaaaaatcacctggacctacaaggacggcaacatcattcattccgacagctggaacgaacgcgccaccgcctgatgactcgccatatttcacgctgtagcgccgttggctgcgttcgcctgccgtcttgctacagcgcgaactatttagagtcatcccctgatgggcagtttccgctgcccgtttttgctgagcgcctgaactgacgggcgctcagcaaaaaaacaatctgcctgcctgacctgatgcgctttgggttcctgaataacagggaacagcgacgggcggtagcgtgtacggaactgataaagagaaaagctcatggaaaatcccgccattttgttacgccgacttaacccttactgcgcccgtgcgatggaaggcgctgccaccctgtgccagacccgggcgcacgcggaaatcctgcctgagcactggctgctgaaactgctggagcagggcgagggcgacctgacggtgctggcgcggcgctacgaatgggatatggacgcgatatggcaggatttgctgacctttatggataagctcccccgttcggtgcgcggccgcccgcagctttcagacgctattcagactctgatgcaggaggcatggctaagcgcttcgctggccggggaggagcatatccgtagtatccacctgctgatggcgctggtggataaacagagtctggtgcgctgcgacggcctgtggccgctgctgaccctggcgcagagccagctggcgcgcctgcgtccgctactggacgcgcagtccgaggaacgcccggaggtgcagcaggaagcagagctggcgcagggcgacgaggtggcgtttgtcggccgtccggttaatgcgggcgtaaaagaaggggatctgaatccggccctgcagaatgcgctggataagttcaccctcgacgtgaccgcccgcgcccgggacggcaaaatcgacccggtgttcggccgtgataatgaaatccgccagatggtggacattctttcccgacgccgcaagaacaacccgatactggtgggcgagccgggcgtcggcaagaccgcgctggtggaaggtctggcgatcagaatcgccgaaggcaatgtcccggacgcgctgaaaccggtaagcgtgcgcacccttgacctcggcctgctgcaggccggagcgggggtgaagggagaattcgagcagcggctgaaaaacattatcgacgcggtgcagcagtcgccgctgcctgtgcttctgtttattgatgaggcccacacccttatcggcgcgggtaaccaggcgggcggcgccgatgcggctaacctgctgaaaccggcccttgcccggggcgaactcagaaccatcgccgccacaacctggagcgagtacaaacagtattttgagcgcgatgcggcgctggagcggcgcttccagatgatcaaagtcgatgagccggacgacgacaccgcctgcctgatgctcaggggcctgaagtcccgctacgcggagcatcacggggtgcacatcaccgatgaggcggtgcgcgccgccgtcaccctctccagacgctatctgaccggacgccagctgccggacaaggcggtggatttactcgacaccgcctccgcccgcatccgcatgagcctggatacggtgccggcaccgctgacccgcctgaaggcgcagctcaccggcctggcgatggaaaagcaggcgctgctggaagatatcgcggcgggcaaccatacccacggcgaacgcctggcggccatcgaacaggacgaagtccgtattatcctgcagctcgacgagctggaaacgcagtacggccaggagctgaagctcacggaaaacctgctcgcctgccgcgccgatatctcccgccaggcggaaatcgcggacctgcaaaaccagcttagtgccgtgcagcaggggaacccgctgctggggctggacgtggacgcgcgcaccgttgccacggtcatcgccgactggaccggcgtgccgctctcgtctctgatgaaggatgagcagacggagctgctgagcctggaacagcagctcggtagacgcgtggtgggccaggacgcggcgctgaacgccatcgcgcagcgtctccgtgccagcaaaaccgggctgacgtcggagaacggcccgcagggcgtgttcctgctgaccgggccgagcggcaccggcaagactgaaaccgcgcttgcccttgctgacgcgctgttcggcggtgagaaatccttaatcactatcaacctctccgaataccaggagccgcataccgtctcccagttgaaaggctctcctccggggtacgtcggctacggccagggcgggatcctcactgaagcggtcagaaagcgtccgtacagcgtggtgctgctggacgaagtggagaaggcccatcgggacgtgatgaacctgttctaccaggtgtttgaccggggttttatgcgcgacggcgaggggcgggagatcgactttcgcaacacggttattctgatgacctccaacctcggcagcgaccacatcatgcagatgctggacgaacggccggaggccatggaatccgacctgcatgaactgctgcgtccgctgctgcgcgaccacttccagcccgcgctgctggcgcgcttccagacggtgatctaccgcccgctcacgcgggacgcgatgcgcacgattgtcggaatgaagctcagccaggtgagcaaacgcctcagtcgccactacggcatgaccactgccatcagcgacagcctgtacgacgctctgacggatgcctgcctgctgccggataccggggcgcgcaacgtggacagcctgctcaatcagcagatactgccggcgctgagcctgcagctgttaagccatcaggcggcggggcagaagccgcagcacctgatgctgggccgggatgaagagggggggattgtgatggagtttggcgcaggggcgggcgtatgagcgagataaaatccctgctgttcagccacagccaccatctgttaacggtgcgcggctgcagcgctcttctggacgtgctgagctttgaaggtgaggaggccctgagcgaaccgttcagatacgtgattgagttcaccagcgccgacaaaaccatcacgccgcagcagatgctgatgcaggacgcgaccttcaccctgcaggcgccggcggaccagggtttcgggattaacattcagcagccggtgcgcacgattcagggcgtggtgacggcgtttgagcgcctttccgcatcccgcgacgaaacgcactattgcctgaccctgcagcctcgtctggcgctgctctcccggagccaccagaaccggatttaccaggatatgtcggtgccggatatcgtggagcatatcctgcgtacccgccacgccatgcgcggggaggactttgtcttcaccctggcacaggcgtatccgcgtcgcgagcaggtgatgcagtacggcgaggacgacctgcgctttatcacccgcctgctgggcgaggtcggtatctggttccgcttcaccgccgacacccggctgaacattgacgtggtggagttttacgatgaccagcggcactacgagcagggactggttctgccgtcggtgccgccctccggccagcacgacggcggtaccgagtcggtgtgggcgctgaaaagccagcataacgtggtgcagcagtcggtgttcacccgggactacaactaccgcaacgcgccggaggagatgagccagagcgcggacgtgacgtccggcgacgtcaccacctacggcgaggcgtatcactgggcggataactacctggcgccgggcagcgacggcctgcgcaacccggagccggagagcggggcgttttatgcccgtctgcgccacgagcgctacctgaacgaccagacccggctgagcggcaggaccagcagcgcggcgctggcgccgggccgggagctgaaggtcaccggaggcgctgaggtgacggaggttttctgccagggcgtggtgattaccggcatccacagccgcgcccgtcgcgaccgcagctatgaggtggcgtttacggccatcccgttctcggaaaattacggcttccgtccgcaaccgggcgacaggccggtcatggccggcacgctgccggcgcgggtaaccagtacgaaaaccaacgatatctacggccatatcgaccgcgacggccgttataaggtcaacctgctgttcgaccgcgaccactggtcgccgggggaagagagtctgtgggtacgtcaggcgcgcccctatgccggggacacatacggcctgcacctgccgctgctggcggggacggaagtggccatcgcttttgagcagggggaccctgaccgtccgtatattgccggagtcctgcacgactcagcgcacccggaccctgtcaccatccggaactataagcgcaacgtcctgcggaccccggcgaacaacaaaatccgcctcgacgacgcgcgtggcaaagagcacatcaaggtcagcacggagtacggcggcaagagccagctgaacctggggcatctggtggacagcgaaaaacagccacgcggcgaggggtttgagctgcggacggatagctacgggactatccgcgccgggaagggaatattcattactgctgatgcacaatcgaaggcgcagggacagcaattggcgatggaaccggcgctgtcgcggctttcagcggcactagtggaaatgcagtcactggctgccagcgcacagcaggcacaggcgctggctgcggatgttggacgtcagcagacgttgctgcaacagaagatagagcagcttcagaaggaagtactcctgggaacggccccgcagggtgtggcgctggcaagcggtgacgatatgctgctgtcggcgcagaagaatctgacgctgattgcaggtcagcagctggatatgggggcgcagaaggacttcacactggcggcgggtaaacaactcagtctctggagtcagaatggggcgaagtggtttgcgtcgcggggggatattgatattcaggcgcagggcggacatatcaccacttggtcaacgcaggacacgcatatttcgagtggcaagaaactggtaataacggcacaggatgaactgacgctgatatgcgggggcggatatatcaaaatcaaaggtgggaatgttgaaattggcggtcctggaaagttgctgataaaaaacatcggtattaagaaagcaggttcgggtagtatgcagggagtaatgaagtcgtttgagtcgggaagttttgatgagaagtttgtcattcgaaattctctgaccaaagaacctttagccaataaggcatattcaataaccatgccggatggaaggattgtttcaggggtgacagatttaaatggttctacatcattaaatgcctcggatgtcattgatgatatgactatcactcttattaaaggtaggtaagatctcagtctttatttatgggggagcgaaatgttactgatgatttattctttgttaataatttatgcgctaatcgcagggagtttgcttacattagttgcatggctttgttgtaagagagttcatggtttgcgtatcatattgctgatttggtttgtgtgtatctgtgtggcgtttgttgctttgtatgctctgcaatttactgaatttggtctcatacgataatgctatgttttcaaaacaggaggtagtatggtatataagactgagccagttagagattaaatatgatgataatggccatccttcttggtgttcttttccatcgcataagaatgttcaggttcgtggagcttgcgatgtgccacctcatctgcctggacttgtaatacttgtccatggtgttaactccacaggtgaatggtatcaaaaagcagagtctgcattatgtgcaggattgaataaacgccttggacttgaaggcactaattttgagttaaaggctaacatatatagtggggatgacaagatagaattagatgagaaaggcgccgaaaaaagaactccaatgtctccattagtagaaaggaaattagttactgacaatggccggtcacctgtaattcgattttattggggctattcatcaccattaggtgacgaagataagtttgttattcctttggtaagtattaagggtgatgactatcatcagatgaagcgagatggcgtcccattgtatgatattttgaaaaaaaggtccttatatatggggcggcggtccttttcaaaatggcacgaataatcttcattcactttggagtaaaaaaggattcaatgaagatttagccaatatacctggtgcaaaagttcaatatggtaatgaagacaaagatcgcttactaaccacagcaccaccacgaaactattatgctcatgccgcgaagcggttagctgatttattggatcttattcgagagaaatatcctaaggatacagttaccataatttcacatagtcaaggaactatggtttcaatggctgctactgcactggcaaataaagcacctgatgctctatttataatgaattcaccttatgcccttcataatagtcaattgaatgccttttcaatgcctcctgaagaatgtatttctccatctggtcgagaaagtactctgtcagcaataattgataaagttgcacttcaatcaacacatttatcttcgttaggctatgaggggttgtgtgtaggtcaatcacaggataataaaaactggaagccagatataactcttgtagctcctgacaaaaatgaaacgagaaatatccaggaaagagataatcacgggaggacttatgtttatttcaatccacatgacagagttatgggttccctccctctgcgttcgatagggtggcaaggtttcccaaatgatgaaaaaggcaatcctcatccacttatcacccagcataaggggtatttattccagcgaatgcttgccagaaatacaccttgtggtatagctcccgagtcaaaaactccatttggtcgattgccagatggtaaacccttttgggatgatgaaggagatgaataccagagcagtggttttgtgtacccagatccacctcactggcaaactgtatttattaatgccgaggaagtccctgagccaattaaggaaaatgaactaagtgatttcgataaaacaagagttggtgctgagcatggcccacaggaaaaaaacggttggggggagcgtgatcctaaaactggttataagaatgacgatacttacgataatttcattaatttgtatcccgatcaggatatcgttattggtgtcaaaaaacaatcggaatatggtacttacggtagcgtaaccccagtaacccgtaaggagacgtttgacgaaaaagatcgcaggatacgttcatatgtcgcacaacctacagatcacagtaccttacccagtaatttaaattttatggcacgagtcgttgcttatgatttacccattggttactgtgaatcgggttgggatagggcttttatcactgatctacgccgtcgggcagactggactcagggactggatacatatttaaaaaccggaattccaaacaatgttactgaaccagaaataatcagcaaagaaacagcattggaagaaatgattcgtgtgaagaccaaagaatacggatattgatatgggaaagaaaatagttgttcttggcgatgctacctcgcatggaggtaaagtagtctctgtatcatctacttttgaaattgaaggtaaaaatgttgcactgctgaatgattcggtgtcctgtccggaacacggttctaatccgatagtggaatgcgatatgagttatgaggaaaacggtaggggaattgtggcgcatggttgtaagagcgcctgtggttccgtgatcttcgctagtttgccggatgtggagataggttgatgggctggtcattaccggaggttcccgcgaggccagatacgcaaccctggtcgccctgggtatgcctatcaattactttcgccggtgtatttatcgcgttagttcgggtcgtactgcattcaccctccggtagtttaccaacgctcgcaagcggctactggctaccactgaccggatatactttggtgggtgttacaattaccgtaaccttttatttgttatggtgggaaatacagactttccgcgtccgtaactggaataactggcgacgaaatatgcacctggcctggcagcgtcaagcacacctgcatttatgcgtgaccaggcatgtggtattaaccgcagacccacaattgctttctcgactagcgggtgttgcgtctgaaagcagcgacgaaacatctttattaacattgcttcccgaagaagcttttattcctggtatttcacgctttgaacaactttgtcgtttattaataaaccagattaaaacaatactttctcaggcctatccttcaggtccgttaacggtgataataaagacatctgctcctgataaaaaacaggaaattcagtatttttcccttctctgggaagatgaaaaattgccatggatgccagatattcatgccttatccaattcgtcagtttttaataattggaataaattcctgtctactgctcgttatccattgcttgtactggcactgcattaccgccagccggaggaagccttagcggaatttgcctgtgcgttgttgctgttgcctgaagcgatgcttaaatcgtcagaacagcgcgatgcagtgcgagtatttcgcgccatgccgctgaatactggtgcattgccccgcgagctggctgaattgcgcgatatggcgcagcagccttctggtgtaaaacatctggtctggcacagcgggttatctacgtcgtccgcacaggcgctgggacgggtggttaatgatttacctctgcacctgcatactgatatcgcagccggtggcattatcgattttgcgaaaatcagcgcagactacgggcatctggcgggatggctgatggtagctgcagcagcagagatggtcaattacggtccgggaagccactggctgctacaggcggatgacaaacgggccggcgcaatggtcgtcggcaataatctgccggttatctgcgatgaagatgtgaacatactcccgttgccttatccggcgggttcactctgccttgccgtattgctcaacgtggcggcttttgggggcgttgcccgtttttttccggactggctgttctcctggtgcggcgtgctcagtatgttactgtcgctggcagtcactctacccggtgctgttttcctgctgcgccgcgccctcactgctctgcaacgcccccactttgttcaggctgccggacttgcccgcaaggaataatccaatatgaaaaggtttttatacatcctgggagcgggtctctgtgtcctggttgttttgttggcgctgttgtttattctggcccagacaactcatcttttttttgaatggacgggggaacgcgtattctggatttcgctgttgggtgcggtttttctgaccagtctgttgagcgtgctgattttttttcttatccctttccaaaaaaacgacaccccgctgactccgcagtacagtcgcccggcaggcgagggggctggtacacaggaacgagatatctccctttcttcgctaaaaaagcacctccgccgccgctacaacctcttctggcgcagtaaggtccgcctgctgctggtctgtggcgaacccgaacatatcgccgccatcgcccccggccttgccgaaaaacagtggcttgaaggccaccgcacggtgctgatttacggcggcagcctgtcatcggcgccggacaccgggcgcctgaccgccctgcgtaagctgcgccgcagccgtccgctggacggcatcgtgctggcgctggatgagagacagaccaccgccggtacgctggataaccatcttcgcgccctggagcaggtcggggaggcgctgcgctggcagccgccggtgtacctgtggcaggtgactgacagcgactggtcgcaggatgcgcgcgtcacccagacggtaggggcgcttttcccggcccgcgccacgccggcgggggtggagcgccagctccgcgctatcctgccatccctgcgcgaaaggggaatgcagcagctgtgcgccgggccgtcgcacgatttcctgttacgtttcggccggcagctggagaaacagggaatagcccactggaaaacgctgctgacgccgtggctgacggagcacctgaagcgtgttccgctgcgcggcctgatgttcagcccgtcgctggcccctgaggataatgccgcgggccatgaacaccgctggtccgctccggcgatctggcagggcgtgacggcggactgcgctcaggcgcggggcgtgcgggtagggatgccgtggcagcgaacgccgggcgtcaccctgctgacgctgattgccctgtggggggcgggcagcgtggtctcctttgccgttaaccgccaccatatcgtcagcgcggcggcgcgggcgcagcagctggtgaatcatcccgcggttaacgacccgcagctgatggcgctgcaggccctgcgtaacgatatcgggcgtctgcagacgcaacaggcgaatggcgctccctggtaccagcgcttcgggctggaccacaatgcgccgctctccgccgccctgatgccctggtacggccgggccagtaaccgcctgatacgcgatgcggccatgcaggcgctgacgcagaaactgaccgtcctggcgaacctgccgccgcgcagcccgcagcccgcagcgcgccacgtcagctaaagcgggctacgaccagctgaaagcatacctgatgatggcgcgcccggacaaagccgacgctgccctgtacgcgcaggtgatgacaaccaccgcgccatcccgtccgggactctccccggcgctgtggcagagtatcgccccggaccttcacgccttttacatgcagagcctgccgtcgcagccagcctggaaaatcacgccggacaggcagctggtcacccgggtacgtcaggtgctgctggagcagattggccggcgcaacgcggaaagtacgctgtatgagaacatgctcacccgggtgcgccgcagctacgcggacatgacgctggaggacatgacgccgcagaccgacgccggtcgcctgttcagcacgccggagtcggtgccggggatgttcacccgccaggcgtgggagggcggggttcaggaagccattgataacgccgtggcgtcccggcgcgatgaaatcgactgggtgctgagcgatagccgtaaaacgctgcccggcgacgtctccccggaggcgctgaagcagcgcctgacggcgcgctacttcaccgattttgccggtgcctggctgaacttcctcaacagtatccggctgaacccggcgcacaatattgccgacgtcaccgaccagttaacgctggccggggacgtgcgccagtcgccgctgattgccctgatgaacaccctggcttaccaggggcagaccgggcagcagaaagaggccatttccgcatcgctggtgaaatcggcgaaaaacctgctgggcggtgatgaccggccggtgattgaccagcaggccgccggaccggcggggccgctggacagcaccttcgggccgctgctgcagcttatgggtaaaaacagcgcgcagagcgtgatggcggcggacagttcgctcagtttacagacttacctgacgcgtctgacccgcgtgcgcctcaggctccagcaggtggcaaacgccgccgacccgcaggcgatgatgcagcagctggcgcagacggtcttccagggcaggagcgttgacctgaccgacacgcaggagtacggcagcctggtggcggcaagcctcggtgaagagtggagcggtttcgggcagacgatgtttgttcagccgctgacccaggcctgggagacggtgcttcagccgtcggcggccagcctgaacgaagcgtggcagcgctcagttgtcgcgaactggaattcagcgtttaaggggcgttatccctttgctgccgcgaagagcgacgcctcgctgccgatgctggcggcgttcatccgccgcgataccggacgtattgaccgtttcctcagcacgcagctgggcggcgttctgcaccgggagggcagcacctgggtggcggacagaacccacagccaggggttgacgttcagcccggccttcctgaacgcggtgaaccagctcagccagctgtccgacatcctgtttaccgacggcagccagggtatcagctttgaactgcagggggtggcgatgccggaagtggtggaaacacagctgacgcttgacgggcagaaactccactattttaaccaggttgccgactggcagagcttccgctggccgggggtaatcaataaaccgggggcgatgctgacctggacgtcgacggcggcgggaacccgtctgtatacaaaccacagtggtccgtggggcgttatccggatgctggagcagatgcagcggcagaaagcgggggacgggctgtaccggctgagcgtcaccgcgccggacaggcgacagcttcagtggctgctgcgtacggaactgggcgacggaccgctggcgctgctgaagctgcgaaacttcagtctgccgtcgcagatattcagcgtcggtgtcccggcgccaggccgcacggatgaatatgaatctgacgttgtggaagggagtgaataatggcctctgttgatattctgctcgccaaccgccggagatccccccggcaacgatgatttcaagaagatgcgtgatgaggtaagggcgcgcaacttattgcttcaatgttcaatgttcaatgttcaatgacactgatgcgatctgaggttgcagaaaacacctatcgcgatcttctccccattttaaacgcacctcctgtagctctaaggctaaaagcatatttctatggacgacttaaccctgcgttattttgacgccgaaatgcgttacctgcgtgaagcgggcgaagagttcgcccgcgcccatcctgaccgggcggcggccttaaatctcgacaaatcgggcgcgcgcgacccctatgtcgagcgcctgtttgaaggcttcgcctttctgatgggccgcctgcgcgaaaagctcgacgacgatctgccggagctgaccggcggactggtgagcatgatctggccacactacctgcgtaccattccatcgctctccattgttgagttcaccgcggactggcgtgaactgaaagaacctgtccgcattgaaaaaggctttggaattctttctcagcccattggtgaaaagcgcacccgctgtcattacaccacgacgcagccgctgaccctgcagcccctgtcgctagcccgggcggggatctcgacggaaccggatgggcgctcgcttctccgcctgcgctttgagtgcagcccgctggcagactggagccgcatcgatttaagccgcatcccgctgtacctgaatggcgacgcgccgctggcctgcgccttgcatgaggcgctgacgctccgggtggcgaaaacgggtatccgctttcccggcgatgctgaccgcagaccgctggacgcccgttttgccgtctgcggtttcagtagggaggaggcgctgctgccggagtgcggcagtttcagcggttatcagctgctgctggagtattttaccttccgtgaaaagtttatgtcggtgacgctacgcggcctggaaaatgtggatttcccggaagaactggcgtggtttgaaatcgatatcgtgctggagagacagtggccgcatgaatatgcgctgtcggagaaacatctgcgcctgcactgcacgccggtgattaatctctttccgctggagtccgatccgctgcatctggactcgttacagaccgaatacctgctgcgcccgatgcgtgtccaggacggtcataccgagatttattccgtggattcggtcacctcctcgcgccactccggtcaccagacgtatgtgccgttcaccagcttccgtcacaagggaggaatgctgcgccatgatgcgccggaatattattaccatacgcgggtaaagtccggtccttcagggctgcacgacacctggctgacgctcggcggcgaggcgtttgataaccacaccgtaccggagaatgaaaaactgtcgctcagcctgaccggcaccaacggccagctgccgcgccgggcgctgcagagtacgctgctggacacggtggtgaaatccaccaccgcgcgcattcaggtgcgtaacctctgcgccccgacgctgccgtgctacccgccggaccgcgatcgttttcactggcgggtgctgagccatctcggcagcagtttcctgtggatgatggataacgccgacgtgctgcgcggcgcgctggccctctatgactggaccgataacgagatgaaccgccgccgcctggaagcgattgtcgatgtcaggcatagcgaggtggaacgttttgcacagggccattttctgcgcggcgtgcagattgaggtgaccctcgacagcagcggcttcgccgggcacggcgatatctgcctgttcggcgagatgctgaaccgcttcttcgcgctgtataccgatattcacctgttcaaccatctgattctgatactacaacctgggggagagcgcctcgaatggcaggagaaccacaaccgccgcattcccggctaagcccccggcttgagcgggaaatctatcgtatcaacttctaccgcttctgccagttactggaaaagcgtcgtccgggcgcatcgccgttgggcagcaccctgaatccggtggacgatccggtacggtttcgcccgcatccgggaatgggcttcccggtcagcgagctgaaaacggtggaatatgatgaagaccatccggatgcgccgccgacggtgcgcacgacgtttatggggctctacggcgtcgactcgccgctgcccaccgcgtggctcgacgagatcgcccagcagcgggaagggcacgaagcgcaggaggcgtttctcgatatctttaaccaccgcattctgacgcagttttaccgcatctggcgaaaatattcctacccggcgacgtttgaagcggggggcagggacagcacctcgcagagcctgctgggccttatcggtctgggaatgccgggtaccgataagcatatcgccaccccgatatcgcgttttctggcgctgctcggcatcatgcgcctgcctgcgcgtaccgaagaggggattcaggcgctggtacgtctgctggctccccgcacgcggaccaccgtcacgccgcactgcccgcgcacgtttttcatcaacaatccactgggtttttacggcaatgacgattttctgctcgatggctataacgtgctgggcgacgaaacgacagaggtcagcagccagctattgattgcgctgtacacggacgatattgccgaggcgcaggggtggttaccggaagggcagatatatcaggactttctggtcctgctgcgggtctatctcggctggcgctataaagcgcgtatacagctgaccgttcctgcccggttactgcctgcgccggtgctgggcgaaaccccctttatgctcggcatgacggggatactgggcgtggagggagaggagatcccgcccgatatccccgccacctttactattgagcctggcggctattgcggaatgccgtctgcaactttacaacaaggaaaccagcgtgttgcataccacttcgattaaacgatggagtttacttcttatgcctttactgctgacaggctgtggcctgacgcagaaaattagcgacagcaccttatcggcggtgaaatcggtgttttataagcaggtaaacgtcctgcatctggacgttaccgcccgggcggaactgaacaccgatgagcgggagaacacctcgctctcccagccggtgatggtgtgggtctaccagctcagtgaccgcaagacgttcgataaacgggtctatcagcagctggtcacggaaagcgaggaggccgccggagacgaacggcttgccagccgtagcctggtggtaaaacccggcgctgacgtcagcctggatattccgatggacgagaaggcgcagtttatcgcggtggtggggttattccgggcgccggatatggtgaagaatgactggaagctggtgctgaggcgcgacgatctcgatcccgacaaaccgcgcattattgaagccagccataaccgcctgacgctgaaacccctgaaggatgactgagatgcccacacgccataatgccccctcgctgtatgaaatgctgtacggcaactttaccggcggactcgacctgcatcaggtcagtgaggaaaaccaggttattctgtcggtgctggataatatgcagcgcgtcctcaactgtcgagccgggacgctggcgcacctgcccgattacggcctgccggatatgactaaaatcctccaggggatgccgggtacggctcatgagctgatgggcatcctgtcggccgtattgcttaaatatgaaccgcggctgaagaaaattgacgtggttctgctcgagcaggctattcccggcgagctgcgttacgccattgacgcggagctgaagggcgtaggcctggtgcactacggcaccgaatttatgcccgagggcagggtgcttatccgccacctcaaacagcagcagtacctggaagtccgctcctctatctagtttttattctggctgaaaccatcatgacgactccttctgaatgttgcctgaaaaccggcggcgacccgcgtacgcttgcggattacgcgcgccttcgcgatgaaatgaacaaactaacccatccggcgcgcccggatgtcaactggcggctcgcggaaaaactctgcctgtcgctgtttgagcacaacggcgtggagctacagactgccgcctggtatacgcttgtccgcatgcatctggcggggctatacggcatgaatgaagggctggcgatactggtcgcgctggtctcccggcagtggggcaatatgtggccgcagccgacgactgcgcgaatcaaaatactcagttcgctcagtcaacggctgcagcaggcgatgcgcacgctgtcgctgacctatatcgacctgagccagctttaccaggcagaagcgcatctgacggcgctggatgacgtactgcagcgtctggaactcaaacatgccggccagcttgatgccctgtctatcctgctgcacaacgcggcggtgcggctggagagcagcgaaaataaagaggagaccgcgccgcaagcggccgcgcctgatcctgccccttccagcctccctgaaccgaccgcgcaggtgaaatgggtctatgtcgccgaaccggcatcgcggccgaatgctgacgttgtgacggcattcccggcgcccgcgaagccctggaagccgtttgtcgccgggatgctgactatgctggcgctggccggggccgcggcgggaggatggcgggcaacgtacccgtccgattcggggcagatgcggtttcccgcccggttctctccgttacccacggtgctttccgctgagcagttacagacgctacgacaacaatccccctcggcggagccggggataaaacagactcagcagcagctggcgcagcttttacagctaaaaccggactgggctttgagttatggtactcatctggcgcagcaggcgctgacgctatggccagagcaggcgaaaccgctggcgcggcaatggcaacagcaggtcagcgccgccgcgcttcccgtggagaatctcagcggctggcaccagggaatgacgcagctacagcagttgacgaaccggcttaacgcactggatgaacagaaggggcggtatatcacggtgagtgagctgaagtcagcggtgtttgccataacgcagtcgttcagccgtaccgttccggcggaagagcagctgcgacaactctccgcacagccgcgcaatcagccagggtctgcggcgcagcagaaccagacggagcagcatctgcaacaactgattgcccgctatgctgcgctgaaacaaaaaacggcggaataagcgtgcaatagccacccgcacgggtcattagcgtgacgcatgactttcgctatcggaacggccggttgccggcctgatgcgacaaccctgccacacccggcaccggcgcgcctgtcgcgccggtgcctcctttcagcgtttaatctccccagacagggctctctaataacgtcgtaattcactggcttcccagctatacgcgtccctggcgattaacgtgtcgccaagctcctgataatcgaaatgataaaactcagcgcgggcgccataaccggagtagtcgactgccgcaaggccaacaaacgctccggtaaagaatccgccatagctttgcaggacataatcatccgaaaggatcgcagcatctagcttcacagggatttcagtgaactcaaccccatcaaagctatattcatagctatacgtttccttcctgactttcgtccggaaccagacatattcaacgtgctccgggaccttgatggcttcatcttttaaatatgatgtataccgccctcggttattctcacctatttcaatgaccttaccgttaatttcattccaggtaatgaacacaaaactccagtgacgatcgttatagtaattcgttaacccggccatttgctggtagttaaatggattaaatttaactttaactttcgcatcaaaataaaaggcttgccagcgtcgggcaatcagcgacaggtcatgggtattcgctaaagatccctggccaattaacgttaacttgccatcgccggtggtacccattttttctgtaaacggcacccgcagggtgttccagttaccatcgagtgtcgccgttgtaaattcgtcgtgctggctacggtcttccggactttcggtatcaatggcatctttcgggccttcgacaaacgtctttccgccgtgaccgccttcaatacgcggccagccgccttcatcccagtacaccttctggatagccgtttctctgcccagcgttgaccagccgcgaggatcgtagactgactcacccgggcgattccacggacgcgcgcagagcgaggcgtagtaccattcgccgccgggggtggaaaccaacgcgccgtgcccttgcttttggatgtagctgtctggcgtatcgacgttggttaagaagacctcacctggctccgtttcaaagctgttggcgtctaaggttttagaacgcgcaaccacttcctggtgcgtaaatacggtgcccccctgggcggcaaaaagataataatatccgttcagtttatagagatgcggcccttcaacgagcccaacggcggtcccccgataaagggtacgcgcggtctctggcattaatttcagggtttttgtatccagttcagttaacgtgatgccgtcaaaaggatggtgatattcgcgatggtcccaggtttgctgcacgatatatttccggccatcatcgtcgtggaagagagaagcatcaaaacctacgccgttaagcttaatgggatctgaccacgggccgcggatatcggctgcggtggtcagatagtttgtcatgtctttaaaggcgccttcggtgactttgacgtcggtatacactagccagaattgaccgtcggcataagagagcgccggcgcccaaatgccgcctgatgaaggattgcctttcatatccagcagggtggtggttgacaggggcgaagggagaagattccagtgctccaggtcttttgactcatgtaaacgaacgccagggaaccactcaaacgtagagttggcgatatagtaggtgtcctcgacacggataatactggggtcggcattaaacccacgtaaaatagggttttgaataagtgacatatcattacacctttttatttaaatgttccaaatgcatttaatttatatttttaactacacgcggacttcatcaagctgacggttaatatcggtcacgtttttgtcagagatgggataaacctgcatgatgatcatcgatatgatggctaacgcgatagggatccacaccgcggtcataatgatcccgtcgatagcgctggcgctttgccgggcgccggtttcattaaagccataaacggccagtaaccacaggggaatcgcgccgccgatggtaaagccgattttgaaaaagaggcccataatcgcattaatgatcgccgcatttcgcttgccggattttaattcgccatacgcaatcacttcaggaaccagcgcccacataaagccggtcgcggacgttaagccccattgtttaatgaaggtggcgatgtaagcaagccaaagcgcatcgtgcatgccctcgcgtgaccagacgtaagtcagtagctcgccgacaataaacatggccagaaaaatatggaagaagccttttttaccaaaaattttcttgagtttgggccaaaaaatagggaatgcgatgcccggtatggaggcgacaaggcctacggcgcccatccattctgaatgaccgacaacgtactgattgaaaaagccgttaaccgtgttcatgaaaaacatgaacgtgaaggccagcatgaaaaacagcccgagaataaccagcgggcggttatgtttgagttcaaggaacagatcggtcgttttgacgttggcggtctgttctgccgtcgcgacaacgcgttctttcgtaaatttatagcagatgaaaagcgccaccgcgccgatgagcatatacacggagtagacgccgaaccaggcgtagttggctgatggatcggtatagtttcccagattgagctcaatgccgaaaaaaccggtgtccttaaggctgcgatcttttggtgaagccatctgtacaaacatcggaaacagggtataaacaagaagattggcgctattggccagcatcattcgggtactggtgagtttatcaatcgattccggatcccgggtcagggatgcattaagcgaaccataaggaatattcactacggaataaactaaatccagagccaaataaacgatgaaggcaaaaggtaccgaacctctgaccccaggaatgggagcaaaaagtaaagcggaaaggatcaccagcggtacgccggctcttaacagccaggggcgatatttacctgcttttgacgttcttttgtcaacatacgtgccgaccatcggatcccaaaagacattgatgattcggacaaaaagaaatataaaccctgccgttgccgtgctgatggtattaaccgtcagcatgtgaagagccagaaagccgcctattgtgccaaaaaccaggttttgagcgaagtcgcccataccataaccaatacgttctccacgcgttaatttatgatattcatcatggcggctttgcattatgtttttactcattctgagcagactccggtgtgttgtgtggatgtgtaacaatttctgacataaatgatctcgaagaatctattacgtttttaaattaatttattatgtttttttacttctgtgatcatcgaagcaaagcctcctccagaccctccatttcacttgttgattaacgcgttacaagctataccccggtagatttaaaacgccgccaaaccggcattttgttttattgttttttttactctggccactccaggaaatgtactctacagagttatccgcgcgctgagtaaatggcgcgaatatttgcgagatggctcacgtttgagcattttcttaatcacggagtgaaataacgtaattgagcaaccggccaggagaatacaggatgtgtcacagttgttaatttttcgcttcataaattatgggattcatcatgccatcttgtgctgagcggggcgctgccaacagtttgactcacccatgcgacggtgccggggcggcggttggcggcggccggaccctgtgtcccggggatgcagggcaaagcgttagcgccctgaacgctacccaccgtctggggggcaaaacgtgatgctgtgagtagggaggacgtcgccatcgttttaaaccacggcgttaatttcggcgtatgccccagcgcattcaatgaattcactgctggccgggggaactatccaaagtgataattcacccgggctgcgctaattcttaaataacaactatggagatcggataaccctaatagtgtaaagcctctgttgacgtacaaaataaaaattaaattgttcttatgatagcgacatattctgattgcccagaatgggattgttattatctgaataaaactaacctatattgagataattatgacaatgataaaaaaacttccattacccatggcggttatcgccgcgcttttcccatttacctctgcagtcgcccaagagttcactcaggaacagatcgacgccattgtggcgaaagccgtcgataaagccctggccgaacgccaggcgaaaatcgacgccgcggctgataaaaaagtggatgttatcaccaacccgcagaccaccgcggccacgccggatatggcgatccccttcggcctgaagttcagcggctacgcccgctacggcgcgcagttccagaccggcgatcagaagtttgtcggcgtcgatggctcctataacggcgcctcggcgatcggccgtttaggcaacgaaggcaacggcggcgaattccagataaccaaagccttcaggagcagtaaaggcgctatctgggatatcaacgtcatgtttgaccactggagcgatgaagttaacctgaaaaaagcctacgtcggcgtcaccaacgtgctcgagtctaaccccaacgcctatatctgggccggccgcgacttccatcagcgcccgcagcaggggatcaacgactacttctggatgaaccacgacggccagggcgccggggtgaagaactttgatatcggcggcgtgcagtttgacgtggcgggagtgtcgcaggtggagtcctgtagcccggaagtgatggcggacgaggccaacccgtcgcgcatcacctgtaccggcggctccggtaccggcgataacggccactacgccctgaccaccaaaacccacaacatcaaggccgggccgatcgacgttgaggtgtacgccaactacggtttcgattcgaaagcggtggacagcgacgaacgtctcgacgcctggcagggcgggctggtgctgagccacaccaacgacagcggcgtcaataaagtgatcctgcgctactccgataactcggataacagcgtctacaacaaaaccgatgacctgaccgcgatttacgccagctttgaagggctgcataaattcacccggcaggcgcagatcgaatatctgctggccttccacgactatgacaacggcaaggacaacaccgataaccgtaaaaactacggcgctattgtccgtccgatgtacttctggaacgatgtgcactccacctggctggaagcgggctaccagcgcgtcgattacgaccagggcggcgataaccacggctggaagctgacgctgtcgcagaacatcgccatcggtatggggccggagttccgcccgatgctgcgcttctacgtgaccggcggccaggtggataacaagcgcaccgcgaaggttaacggcaccaaagacgagcagctggattcgttaaaccttggcggcatgtttgaagcgtggttctagaagccgatggatccaacaacgaagaggctggcgtgcgccagcctcttcgcgcgttcagctatctcaatgcaccgtcaggcgcagggccaggtcctgcgggtagggatcaaagtagttctgcgcctgcagatagcgatccgggtattcggccagatagtgcttaagcagcgttaacggcgcaaggataggcagcagcccggagcgatagttaaggatcacctcccgcagctcgccgcgctggcggctgtttagctggttacgaaagtagccctgaatatgcatcagcacgttggtgtggtttttacgcgaggcgggctgtttcaggatcgtcatcagtttttcgcggtagatcgcaaagaaagcctccagatcctgccattcgtggagcgaggcaacgaatgggccaatctcgcggtatcccgcctgatggtgggccagcagctgcagtttatagcggctatggaaatccagcagcgcgcggcgcgtcaggccatttttgtgcagacagttaagctcgtgcagggcgaagacccgttcgacaaaattttcacgcagcaccggatcgtgcaggcggccatcttcttccaccggcagccacggatatttctccatcagcgcggcggtaaacaaccctgtgccttcttttcgtccgcgattgcccttttcatcgtacagccgcacgcgctccatgccgcagctgggcgatttggcgcagacgataaatcccgatagctcgcccagggtcgagaggtgggcgctggcgaaatcggccatcttctccgtcacgtcgtcgtgcggtgcatgcgtgaagcgcatgcggatttccccttcggtcgtttgcaccagccgcagcgccgggcgcgggacggggaggccgatagccatctccgggcagacgggtttaaacgccacccactgcgccagctcgtccatcacgaagcccatgcgcttatgcccgccgtcgaatcgtacggcagaaccggtcaaacatccgctgatcccaatgacaggttgtgtgttcatggcgtagtcctcttttattgtgcggttcgggtgaagaaaagggtcacggtggcgacggtaatgccaaatttcttcatctcggttttgttgaacaggtgcgcgtcgtcctgcaggaacatccagtcgtcgaagtgcaggagccaggtgctaccgctggccgtcacgttcatgctgtagcgccagtgaaaagcgttgcccgccgcctggccggtcgccacgccggcaatgtcgccggcggtgccttcataacggtggtcgccggtgcggcgaatgcgccatacccgctgctgcttttcgccatcatcgtaaataaagcgttcgtggagcgtcagcgtgtcgccaacaacgtcgccgtcaatggcgacatggaagcggcgcagctgtttgccgttgcgatcctgaaccatcccccaggcttccgttttgccctgaaagtagtggaaaatgtccagcgccggctgctgctggcggtagtcggtcacttcggcgctgcagcccgccagcgccagcatcagcagcgcgaggccaagggtcagaatgcgtttcatgatgttcgctccgcggtaagctgcacaacgctgatggtgcgggcgttaaacccggcttcgcagtagccgaagtagtagagccacatgcggcggaagcgatcgtcaaagccgagcttctcaatatcctgccaggcgtggataaatcgctgccgccagtgggccagggtgcgggcgtagtccggccccatatcgaacagatcgcgcaccacaaaatcggtgtgccgcgtcatcagctcgttcatcgccgtgatgctgggcaaaaatccgccggggaagatgtagcgctgaataaaatccacgtttttgctgtagccgcgatagcgctgatcctggatggtaatggcctggatagccattctgccgcccgggcgcagccgcgcctggcaggtgcgaaagaaagccggcagatagcgttgccccacggcttcaatcatctccaccgacagcagcttgtcgtactggccggtcagatcgcggtaatcgcagagcagtacctcgacgcgatcctgcagcccggcgcgggcaattcgcgcgttggcccactggaactgttcctgcgacagggtggtggtggtgacccggcagccgtagtggcgggcggcgtattcggccatcgccccccagccggtgccaatctccaggagatgatcgccgggcgtaagcgccagacgctcgcaaaggcgcgccattttggcccgctgggcctgggtgagatcctggccgtcgtcggtaaacagcgcgctggagtaaagcagctcgtcgtcaaggaagtgggcgtaaaagtcgttgcccagatcgtaatgggcggcgatatttgccttcgcctgcgcgcgcgagttgcggcgcgtccagtggcgcagccgctcgacgggcttgctcagcagccggaagccgcgctccagccgctccagtacctggccgttacgtgccaggatctgcagcagcggcgtcaactgctggctctcccattcgccgtccatccaggcctccgcggcggcgaggctgcctccggtcagtaaacgccggtagacgcccgaggagagcacgtgcacctcggcgcgcagcgcggcggcggggtcgccaaaatgaaaggtctgcgccccttcgcgtacggtgagcgccccttcgcgaatgccgctcaacagacgaaagagcaaccagcgcgcgatacgcacgttgcgcgggatatcgggttcaagcgcaaagacaggatcggtcatgagcgttcactcctgctgacaggatggttgtacagcggcacgcgcttgagccatagccgcagcgcctgccagtagatcgcgaggacggttttcagcgtcatcagcggaatgcgcagcagcagcccgcgcaggctggcccgcgttaaaggcgcgcggctcagggccagcgtggcgtcgaagactttcgcggcctgatggttctcgatatgcatgtgcagcgttttaccgggactgttaaagcgccagaggtagaccatatccatcgggttaaacggcgagacgtgaaaggctttcgccagcgggcgcgcccgttgaccgtctaccgcgtagtaatggcgctcattccacggcgtgttgcgcacttcggccagcacccagcgcagggtaccggcgccgtcgtagcagtagtaaaagttgaccgggttaaaatgaaagcccaggtagcgcagttgggtcagcagcatgacgcggccatccgggcgcgcgccggtcaggctttccagccggttcagaacctgcgctttcagcggcgtgcccagcggataatccgcatcgtaaaaagaggcggcagcaaagcgattgcggcggatacccgcttcgccgagccgatccagctcatccagatcgagccaggccataaagatgcgatagcgaaagtggtgcgctttcggctgaagacggcggtggcgtaatacgccctgatagaggcagctgttcatgtcagaggttctccgccgcgatgatgccgttgaccacatcgagggcgctgcgcacgccatcttcatgaaaaccgttgtaccagtacgcgccgcagaaccagcttcgctggcggccgttaatctcctcgcgccgcatctgggcggaccagctttggggattaaatagcgggtgttcatagaccatacgcttccagacgaagcgcgggtccaccggcgttggcgaattgagggtgacgcagaacagcggggcgtcggcaggcaggccctggagaatattcatgttataggtgacgcaggcgctggcctgatcctgttcgctcaggcgatagttccagctggcccaggcgcgcttgcgcaccggcagccagcggggatcgctgtgcaggaccacctcgtttcgctgccagccgatatcccccagtatttcgcgttcggcgagcgtcgggtccgccagcatggccagcgcttcggcagagtggcaggcgaagatcgcctgatcgaagtgctgctcccccgatgccagctggagcgtgacgccatcctgatgacggatcacgttctgcaccggcgcattgaggcgcaggcgcaggcgatcgccggaccgggcaagcagggcgcgcacgtattcgcgcgagccgccgggcaccacgtaccactgcgggcgctggcggatatccagcaggccgtgattatcaaagaagcgcaagaacagcgccagcgggaagcggcgcatctcctgcagcgacgaagaccagatagcggcccccatcggcaggatatagtggcgtgcgaaaaaggggctaaaacggtgccgctcaaggaaggtctgcagcgtggcgcccgggtcgaacgctcccgccagagcctgcttcgccaggcgattaaagcggacgatctccgtcagcaacccccagaaggccggctttagcagattgcgccgctgggcgaaaagcgagctcaggctgtggccgttatactccagcccgctttgcggattgtggaccgaaaagctcatctgcgttttttggccgctcagcccaagctcgttaagcaggcccataaagcgcggataggtgcgatcgttatacacgatgaatccggtatcgatggcccaggtaccctgcggcgtggcgatatccaccgtggcggtatgcccccccggcgtggacgccgcttcgaacagggtcacttcgtgttgcccggcaaggcgccaggcgcaggtcagcccggcaatgccgctgccaataatcgcgattttcatggacgcaccatcctgcgcaatagcctgcgctgaagtccttcaggaagcccggccagcaggcgcagaagcaggcaaaagcccgtcgggaaggcgatacgatcgtgccctttcgccaggccgcggcgaatcgctttaaccgcctgctccacgctcacctggccgggcatagaaaaatcgtttttacgcgtcagcggagtgtcaacaaaccccggcgaaacgaccgtgacggcgatccctcttggctcccagtccaggcgcagactgttggcaaaccaggtcagcgccgctttcgaggcgccataggcttcggcccgaggaaagggtagccagtgcgccatcgagctcaccagcaccacgcgattcccggctgacagctgcgactgaagcgccgccaggcagttcaccggcccgagaaagttagtggtgatgaccctttcaaccagcccggcatccaccgttccgtgttcgagatattcgcaggtcccggcgcagagaatgatcagatcggcgcggcagtcagcgagcgtctggcgacaggcatccctgtccgtcatatcgaaagagcggacgctgatgtggggactgtgctgctgtagcgccgacagacgcgacggatcgcggccgcaggcgataacccggtggccgtccgcagcgaaggacctggcgagcccggcgccaatgccggagctggagccggtgatgagcaccgtcatcatgaccgcaccctccgtttagcgccgcgcaccgcccagcccagcaggggaaggtgttcgtacagcatctccccggcgtcgtagtagtcacgctggtgaataattcgttcgtcttcaacggtgaccaccgagcagcccgcaagctgtagcgccttacccccggcaagtcgcggatgcgaccagtgcatggtccaggcgacggcaaaacgttgaccttcgcagagcggggcatcgagggtgaaacggcaatgatcgacgttggccagcaggtgcgaaagataactctggatcgcggacagcccctggtgttggccaaaaggatcgatcagcagcgcattcgtgtggtacagcgcggccagcgccgaaggcggctgggtatccagcgtggcgtagtacgtactaaaacggctaatgacggatggcgagggactcataggtcacttcctgagtaaacaatatggcatagttaaaacttacacaattaatattatttgtccaagttttgactaaaatattttttattttcattgattatcagttggttaataacatgtctttgaagcatgattttgtgggtgttggagagaaaagaagagtctgcgggcttgtgcgaaaaaagaagaggggcaattctgagggacctgctcgttgcgccacggagcggtggcgcacgcagttagagcgcaacaatctccagagagacaacctgttgctgccagcgttcaacctgtttctgccgggctgcagagagtttaccggtcgtcaccagcagccatttgcgatccggcaggatctccggcgccagggtcgcggggggcgagggaaggatgtcgatgcggtggccctgaccggtgcgtttgagcgcttcgagccagatttcgcaggcgtccgtcaggtgccagccggtgatcagatagttatcgccgggcgcctttttgtccccttcgaggcaaaaagaggtgtaggcgataatgatgccgtcgaggatttcgcgcagcgtcatgatggccggtacgttggcggaaacctggctacgcagcgggcgcagcacttcggtgaccagctcggggcggggggattcacgaccggcgtcgtaaatcagctggcgcagggattcgattttcccctctttaagccgctggagcatgttctcctgcaaggtgatccagttattcgtccgccgtgcgccagggcgcgccagcaggggctttacctggctgacaggtacccctttttttacccagtcgaggattttaagcgcctgctggatatcgtcatcgttatacaggcgatggccgccatcggtacgctgtggtttaagcaggccgtagcgacgctgccaggcgcggagcgtcgtcgcgtttatgccgcaaagctgcgcaaattctccgatggagtaggtcataaggtacacctgataatcaacaatactctcaataatatactacgaatagctgcgggttgagtgcattccacgcgtttgcaaaccgttagcctcgccggaacttagtgaaaagaaaaaggagagaacaaataaatcgccaccatccctgagaggctgacgatcgtgctgatgatgaatcgggttctgaacggctgcttttgcgttttgtggcggaacagctgttggccggctatcgcgccagcccagccgcccagcaccccgaacgccagcaatgtggcttccggtactctgcgccaggccctgcgcgccgccattttatccacgccgtagatcgccagggtcagcgcgttgaccagcaggagccaggtagcaaagggccaggcggtaaaaatgctgccgaccgctgcgaaaatcaggagcaaataacaacatcgattgagatttatcatatgagccgcggttatttttagcgtgtatcgaagccgcattatacgcattacccgcggcgagaaaaatccgctgcccgcttcggatggcgtgagcttattgcgtcatttgccggctggtgtacaacgtcatcccgaccgcggcaagaagcagtatgccgcttaagccaaacgcgctttgccaccccaggcggtcaaataccaaaccgcccgtcgtcgaacccagcgcgatcgacagctgaataacggcaaccatcagaccgcctcccgcttcggcgtcgtcgggcagcgtccgcgcgatccatgtccaccaaccggttggcgccgcggtcgccagcatcccccacaggcttaacagcacggcaacggtccaggcgtggtgtcctaccagaagcaacgtgccggcgatgagggccatcaacaaagggatggtcattaaggtctgataaaaccgggcgttgaggagtgtcgaaacgcccagggtgccgataaaacccgcgatgccgatagcgagcaaaatcagggacaggccagaggcgctgacgccggtcaccgcttccagaaacggccgcacgtaggtaaataaggcaaactgccccataaagaagagtccgcaggccagcagaccgatcgcgacgatggaatgtctgagcaggcgaagcacggagccgcgcggccggctcgctttatcgctttccatcgcaggcaggctgaagcattgccagatgaacgcgactatcgccagcggcacgaggcagaaaaaggcgccgcgccagccgacggtggcccccagatagctgccaagcggcgcggccacgacggtcgccagcgcgttgccgccgttgaaaatcgccagcgcgcggggaacctggtgcgcggggaccagcctgatggcggtggccgccgacatcgaccagaatcccccgataacgatgccaatcagggctcttcccgccatatagatcgcatagctgtgggccagcgcgacaatcattcccgagaccgccatcagaaccgtcagccccagcagaaggtgtttacgattcagacttccggcaaggttagagatagtcaggctggtcagcaccgccagggcgccggaaatcgcaatgccctggcctgccagcccctcggtgatgtttagctctccggcgatcggcgtcagcaggctgaccggcagaaattcggaagcgatgaggacaaaaacgcacagcgtcatggcaaagacgccgccccaatgggcgtgcggttgagggtgtggtgtacgacgactcagtgtggacatgataggggtatctctttatttttccggccagattcgggtgcggctggagcggacgctattcattgaataacgactaaagcgtgggtaaacgtcatgcgcgggcgagggcaagccgcccgcgacgatcgggcggctttcggccgttatctcaggttggttttgaaaaactgttcaaatctggcaaacgggattttaccggccgcattgtcatagagatcgacatggttcgcgccggggacgatcaccagctctttctctttgctgccgatggccttaaaggcgtcttcggcaaaatagcgtgagtgggctttttctccggtcacgatcagcgtcgggatagtgacttcactggcatagctcagcagcggcatattcataaacgacagcggcatggttgcattccacgcgccggttgagttcacggagcgggcgtggaaaccgcgcggcatccggtaatagtcaaagaactctttcaaaaccgggttcgggttggccggtaaggtttccggcagaatacgatcgcctgcgctgacgtgacctttctgatcgacataaatatcatgcccgcccggcgcgaatgtgccgctttccgcatccttccagcgctgcgcgttcagatactgcaagacggcgcggcgatcggcggtagtatagcggtctttaccgtcgccaacgccgtggcccatcgcgcggctcatgtcgtacatgacgctggtggccaccgctttcacccgggtatccatcgcggcgtcgttcagcgccatgccgccccagccgcagatgccgagcaggccaattcggttgcggtccacctcgttttgcaatcctaagaaatccaccgccgcgctgaaatcctcggtgttgatatccggagaggcgacgttacgcggatggccgccgctttcccccgtataagaaggatcgaaggcgagggtgacaaaaccctgttccgccagggtctgcgcatacagaccgctggactgctctttcaccgcgccgaaggggccgctgactgcaatcgccgccagcttgcgctcgccgcgatctttcggaatgtagagatcgccgaccagggtgatcccatagcggttctggaaggtcaccttacggtgagtgactttcgcgctttccgcgaaggttttgtcccatttttcgaccagcgaaacgggcgcgtttggattggttgtcccggcatagctcatggtggtgactccacttagtgacgcgcatagcagcatggcaggcatggcggccgtcaattttctggtaaacgctttcattaatcattcccctaaaacaggttccagatacaggtttcatacggacaacgctgctgtgctttgttgcaatgcgctgattatagttagcagtcagagtgctgattagcgggtgaaaagtgctaagattcatatcatattgttataaattacggcgcaggcgcgggaggaatcatggcaaaacgggaaaactataacgatctgtacctgtttatgctggtggtgcgggagggcagttttaccgccgcggcgcagcggcttgggctggcgcaatccggcgtcagccgtgcggtacgtgaacttgaagaaaggctgggggtacagcttctggtgcgtaccacccgtaaactctcgctcacccaggccggcgagcagctctatcgaaccgttgaatctggctttgatgcgttagattcagggctttccactctggcgtattatcgcaacaccccctccggtaccgtccgcatcaatgccagccagcacgccattgataaagtgcttctgccaaagctttcggtgttcaaacaacgctatcccgatatccggctggaactcatcagtgaaagccggtttgtcgatattatcgcggagcgatttgatgccggggtgcgtctggggccggaagtcggcggcggtatggtcgcggtgcgcatttcacccgatatggagatggtcgttgtcggcacgcccgagcattttcgccgctacggttttccgcaaacgccggcggacctggtggttcatccctgtatcgcgtaccagtttggcgacgggactatttatgcatgggagctcaatcaggacggtaaaaaaatcacccaccggccgcagggacagtgggcctttgccgacagctatatggaagcgaaggccgcccggctggggttggggctggcctatgtcccgcaggaactggttgccgatgacttagagcgaggcgcgcttatcagagtcctgcagcgttacagccagcggctggaaggctcttttctctattatccccatcgtaatgtgtcgcccgcgctgcgggcggtgatagacacgctgagaatctgagcaagcaggacccagagtcgggcgcggatcgttgaccgggtttaaggtagtaaccgcatgcatttatcaatcattgtggttttgcgcggggatgagtgccttaatcccgtttttcacaataagctttctaaccactcggtaaatacccgcactttgcgtgagagatggcggtgcggatacaggagtgacaatttgcgatcgggggtagggttgtcaggtaagacttccactaacaggccgcgatcgagataaggctgtaaaaaaacgttcattccctggactaatcccagccctgccaggcctgccgataaataggtttcagagttatcgatgaccagcttgccgggaagcgtcatttcaactgttccttctggcgtagaaaacgtccacggcataatttgtcggctgctgctgttaatccagttgatggcctgatgctgctgtagatcctccagcgtttgcggcacaccgtggctggcaatataggacgggctggcgcaggtcgtcattttaatattgcttaacttacgggcgatatagtccccgtcgtccagttcccccacccgcagtaagcaatcaagaccatcgcgcagcatatcccggcggaggtctgagctactgaggatgatttcgacgccagggtgctggcgataaaaatcaggcagatgggggacgaccaataacgtcgcaaaagcgacgggcatatccacgtgaagctggccgcgcaatacgctatcgctcccaaacgactccagcagcgcatctgcctgggccagtaaaggtttactctgccgataaaacgcttcgccgtcaggcgtcaggttgatgcgccgcgttgttcgctgcatcaaacgcgtgccgcagtgctgctcaagcagctgcaatgccttagtgacggcaggacgatgaatctgcaggttctccgctgcctgagtaaagctaccggactcgacaatttcaataaaaatgcgaatcgattcaaagaggtttatttgcatagcgggcttcttttgccggatcgggatatcatattgttactgattttataatagtgatgcactttttcggctatttttctaaataatataacgtcctacactccttccatcatgaaactgaaccgctccatagcgctattgtgaaggatattaccccatgaaaaataaccgaatctgccagatcctgaatatagaaaaacctgttattcaggggccgttatcgtggttgaccgatgcccgtttagtcgccgctgtcagcaatgccggcgggcttggtgtgctggggccgaatgccggtttaaccgctgagaccgcggtgtccacgccggaagaaaccgccgaaaaaatgcgtgaagagatccgcaaaaccaaacggctgaccgaaaaacctttcggcgtgaacctgatccccgctgctgaaaacgatatctggaccccgcctattttgcaggtgataaaagaagagggcgtcagagccgtggtgtataccggctacggtgaaggagcgctcataccggcgctgttcaacgaattaaaagaggcgggcattgctatcatctatcgcgatattaacccgacgcctgaaaatacccgccttgctgaagaagcgggcgccgatatcatcgtcgcgaccggctttgatgagggaggtacattgccggggaccgcgctgggaaccttttctatcgtgccgctgatcgccgatgcggtgaagcgtgttccggtgatggccgcgggcggtattaccgacaagcgcaccgccagagcggcgcacgcgctcggcgctgaagggatatttgccggttcggtttttatcgcgacggaagaaagcagagtgccgcggtcggtcaaaaataaaattattgccgccagtggcctggatttgctgcttttccgcacgctgccccattactatcgctctctgccgggcagactggccgaaaaactggtggcgatggataaagccggcgccagcaacgaggcgctcggtgaagcaatggggggattacgcggcctgcgcgtcggcatgctggaaggcaatgccgatgagggctatatcgcgctcggcacgggtatcggcagcatccgcagcgtcaaaagcgtagcggaagtggtcgacgcgttaaccgtgagttagcgctccccaagagacgcaggccgttcagctaaatcatccgcttgttagcgtgtctgactgagaataatacggtcgaatagacggtcgcccagccagacgcgcagacagataagcatttttgcaaacttacctgcggcatagcgcgtacgtgggttcttactgttaatggcgcttgaaacgacatccgcgataaccttcggatcgctgcctgtcccgtgcccgtaagtttttttgatcgacgcggccaccattttcaccagttggccataggggccactgtgtgaacgtttgacgatgctttcgctggcagcatcaccgaagcctgtctctatcacccccggctcgacgatcgtgaccttaatcccaaatccggcgacctccaggcgcaggcagtctgaccatccttcgagcgcgtgttttgtggcgtggtaccaggcaccaaggatgctgtacatcttccctcccatcgaggagatgttgacaatatgcccgctacgtctggcccgcattgcagggagcagtagctgcgtcagccgtgcggcaccaaagaggttaacctcaaattgatagcgtgcttcatcaataccgatctcttctacgggtccatacaggccaaagcctgcattattgatcaggacatccactcccccggtttgcgacagaatggcgtttacacaggagacaatctcctcatccctggctatatccatccgtaacggctgtgcgccaagttcggccagatcggccattttatcgatgctacgggcggcaacatatacctggtaaccatcctgaatcaggcgacgggcaatagctttacccatccctgacgatgcgccggtgaccagcgcggttttcttttccggagcgaacataaggacctcgtttcatggactggctacagtttgcctgcagacagactcttttcatctggccttatgcgccagtacgcttgctaacggcgccattcgcttcagatcagaaaggaagccgccttctgtggaaacgacaggaggtaacgcgattcttatggcaagtcggtgcttaacaaccgcgtcatctcgtttgtttaacctgaggagctctttccattaagacgcatgctccctctgacggtttccggcgtctgtccggtccaggccataaatgcgcgatagaaggagtttggatcttcaaagccaagcaggaatgcaatctcatagccggagagatgggtatgactcagatagtgccgcgccaggttctcccggcaaagattgaccaatgtacgaaaatttcctccctcactttcaagtctgcgctgaagcgtacgtttgctcataccgagacgctccgccgttttctcaatggtggcttcgttaccgggaagaagctcaagaagtaccgcctgtacgcgttcagttgttgaggccatttcatctaacgtgctgagacggcggcgcagctctggttcaaatatttgccacattccttcgttcaccgttaaaaacgggcggagggcatcagcggcggaaaagctgatggccggtttttctccatacgctacggcggtaccgaaaaagcgggtaaggtggccgtcctgtattctggcgggaagctgagggagcgtgactttcactgctgtgaccggttcgcgagtggcaagttttagcagccgcagtaagaaagcaagttctgctatctgcagggacggaggaatgtttgtcgctgacagccagcacggtgaaacggtaaggatgccgctgtgttctacgactatttccagaaccattggggcaatgagttgcttatatctggccagtcgctgaaccgcctgcatcatgttggtgctgcatagtgcggcgaaaagcgggggatcaaagacttcagcagagaccctttctaccagtggtaagggaaaagcaggatcgtttgtttctacctcaagggcgcgccagaaacgaatatactcctcgatattaaggccgcgctctgtcctcgaaaacgtgtcgtcgggcaatcctgctttgcgcagtagatgttgaggctctaaacccgcatcttttagcagcgccttccagccgatattgagagagaaagtccggttatgtgccattgtcaggtttccgcaggatgagtgttgtcagggagcgaatcttttcccggagaagagcataacgtttcaatcctggcggtaacattcataaagcgccacaattgtggcaaatcacgccaaatgagaggcggctgtacaccttcccggagtcatcggatcatccctgggcggcctctccagcctgggccctggattcattcgcgttaccagctcgccagctggcgaaatcgtggcgtgaaaataaagcttgctatcaatcgccatctgtgtgatcaatagcaagttgatttactacacagatgcggtaataaacggtttagcgaagcagttctcatctcaagcgttatccacagataatccttctttagactctccttatcgtgattaattaagctctgtgacgcgaataatgttaaagttttttgaacctgcgacaacgatgacggtctaaacccgagtagacaggctcagaagctggcgcaaacggtgataatgaaggaaagtccttgtatctcccgtttagcgtgaaaagtgcataagagatagcgttatcccaaagcacacgattattttattgaaatctaccgaacattacgtgccctcgggcaaactaagaaattaacaacattaaaaaatcgctggtgcagtaatagagttcagtctgaagtgcgcttcagatgtttctataagaagtaatgacaatgatgtcattgttattctcaaccattcagagcagcatttttacgctgtgacagaaaagccgggaaggcgttttctgtgaaatatggctaaatgtccctgcggtagagaatgttgtagcaaaaagaggctaacatcatgattgaccacattcatttcagatgcccatgctgtcatgggtcacagtacagaacatccacctacgatgtttctgaaaaaaatccgtttggcgcgaaatgcattttttgtaaatccgcaatgattacatttgataacatcgcaccgcatatttccagaaactcggcatcgctggcgttacggaagtaagaaaaggccccgaaaagggcctttgatatctgaaaataccctaaataattcgagttgcttaaaggcggccagggcgtgagcttcaagaagcatagataacgccttatccaggcggcccgtaagggcgagactcatggatgaaccgagtaacaaagccaacacataagccgcttgaagtatgacgggtatagtaagcattattaccattttgatcgggctgcctgcgggcagctttttagtttgtttaaatttaaatcacgccgtacttttcttctctttgccgatgtgcgtcaatgcgcagctacgcaattcttacggaaatcttgttgcgttctataattcttaaaccagaactaatcaggtatttctatgcatatcctaccgcccgtccgtccggaagagagtatccagcgcttaacggcgctcctgacgccaattgctgaaaaaatggtcgttgtgccgcggaaacgcatgacctggacgcataaaaatcaaccgcagttgttccttttccttgacggcgagctctccatactccgggcctcggacggtctgttgattgtcacggtttaccacccacacctgtttggtattgccgagatgatccagccggtacgcggccatcagctgcgtgcggaaaccgaatcgacaatactgcgcgttgatgcgcaaaaagcgatggaagcctttcgccagcgcggcgtttgggaagacgtcgcctcactgttgtcgtaccacacggcttatcttttctatcgcgacgcgctcgtcgtacagcagcgaacctacgccgttatccgcaatcatttgcaggaaatgggccagctacccgaagagacccggatgcgggtctctatcctggattatatccaggaacgtacgcacttatctcgcagcagtgtattaaacgtgttgtcggcgttaaaaagtggtaattatattgcttttaaacggggagggtatttgacgggggtgaataaattacccgagcgtttttagcgctggcagtttgtccaaaattaaataataaaacgattatcagcgcgacgctaatattctattgtaggcccacttaacttttgacgaggacatttattcgacaacgggtcgacaatgggatgattatgaagaagacgcttattacgttaattattgctcatacttttacggcgactgccgcttttgctgctgcggagactggaacctggtacgcggggtctaaatttggctggtcgcactacggcgactccagcaccgatcggcaagtcgatgttgaccgcgataacgtcggcggcggtgtgtttaccggctatcagattaacccctggctggcggttgaaggtggatatgactatttagggaatatgggcatcaatggtcgccatggcgcagccggttcgcaaatgaaaagtcaggggctacagctttcgttgaaggccagctacagcctgaccagcgactgggatctgtacggccgggccggcctgatgggctaccgtgcggaatccgatgtgaatggaaaaaatcgatttgatacgggcgtgcgtccggtgctggctttcggtaccgaatatgcctttaatgacagatggtcggggcgcctggagtaccagtgggtcaacaatgtgggtaacgaaaaccaaattggcgtgagcagcgatgtgagctccgtgatggccggcattagttaccgctttgggcaataaacgcatcgtacgggaagagtctcctttgaataaaaggggctctttatctgctaatggtatacctatggtcataattacagtatagaactggtagccacaggacccgataaagtgtgatcgtgatcaacattgataatcgccaatgcctttaaatatgatacagggaaaataaatgtaatatattaatggtgattttatggcaattaaggatttttttaaacagaccacacctggacgccgtcgttatggcgtagcgttatttgtcggggtagtggcagggattatgtcggcatttgttaaatggggcgctgaagttcctttaccgccgcgtactttctccggtggcagagatgaatttaacccaccttatcttttcttacgcgactatctgggcattgacccgacgcatacggtttatactttttccgaacacatcatcaatccggtgatggttacgcatattatattctcattggtatttgccgttggctattgtgtcgtcgcggaggtctttccgaaagttaaattatggcagggggtatgggccgggattgtcgcaactatcgccgtacactggatttcctttccgttactgggcctgaccccctctttattgaatattcctgccgatgaatatatttcggaactggtggggcatattttttggttctgggccattgagatgattcgtcgcgatcttcgcaaccgcatcacccacgaaccggacgctgaagtgcctcttgacgcgccgttcagataattaatccccacagagcccgcgatctcgcgggttgtgtggggcgggacgtagagatcaggacagagatgaaggcattgtattcagcgcgaagttgaggatcttctcgccatcaaatgaggcatagggcaagctttcaatcacggcaatttcttgtggtaaatgcagtgcgctaataaattgttcaaccttatactggatatgcggcgcaaccagtacgccatcataggcaggcgcgacgctaaagaaattttcaaccccaacggcgctgattaataaatctaattgccgatcgtcagcaattttttgcattttgcgggcaataatccctgccgtttcgccaaacagacagcatattaatagttttttcacgatttaaccctcggtgagatagcgaagctacactattcctcctttactcacgaaaatgcgcgatgtatcaatatttgaggttaatttctgcggatatttttattatgacggagagcatcacagatgcgaaaaacgtatgcctctgtgatgctgtgaatggcagggatgactctcaggctacctttttttacgtgaaatcaggaagcgatcgccggctcgcgtgagcttcgttccatttgtacagtactcgatagcaaagttaaaaaattcatcagagtcgagctcgaaatccagttcgagtttaatggcgtcgccggactgcagaagctgctttgcctgttccagattgctggcttttactgttcccatctcttcacctcgttttagcgctggtggcgtccgggggctatcctacaggctttgttttacgatcgcgtgacacggcttattatttgcgctttctgccgttcgccagccgttgccatcgctatggataagccgatagcgatggtccggggttcaatctcagtcgacgttattgaagtagtcccgcgccgccgcctcaacgttctttgcctcaatgcccgttttctcggtgatggaggcaataaacggcttgaacttctccgtcatcacatgacctccgtcccaatgagcgacataaaaacggcactgataacgataaaagtggagagttttgtctcctaacgtgtaatacatatgaatctccggttcagtatgtcgggtggacaacaacaagcgatgagcaaagcacgcatcaacggattctatcctcctcccaattcgcggaaatttccagcatgccgtacaaaaccatctggaatacgtagggagaggcattctccagccccgtgctatgcaacgccttacgcaaaattcagcgcaacttcaacggcttcacgccaatctccgacaggcgacttgaaaaactcagatgaactatcgatactgtataaaaacacagtattataacggtgagtctattatgttgttctataaaccggttgagttgcgtcagatcgtgtcgattccgctgtttagcgaccttgtcccatgcggttttcccagccctgcgcaggattatattgagaagggaatcgatctcaatgagctttgtatcagccatcccgcggcaacctattttgtcatggcgacaggcacctcaatggtggatgccggtatttatgaaggtacgctgctggtggtggatcgcggcctgaaagcgaagcatggggatatcatcattgcctcagtcgacggtgaatacacggttaagcgtctttgtacgcaccccatcatgcagctcttgccgatgaacccggattttccgccaattgtgctgcgcaacgacggtgaagcgctggagatttttggcgtcgtcactttcagcatcaacaggctccgctgatgtttgccctggtcgatgtgaattcattttacgccagctgtgaaatagcctttcgccctgacttacgcgggcgtccggtggtggtgttaagcaataacgatggctgcgtcatcgccagaaaccatgaggcgaaactgctggaaattccaatgggcgcgccgtatttcaaagtgaaatcacagtttgaacgtcatcaggtagcggtgtttagcagcaactatgccctttatggcgatatgtcccatcgcgtcatgacgattctcgaagaactggcgcccgcggtgtatcaatattccattgatgaagcgttcgtaaatttgaccgggatccatcgttctgaggagcttgaggcgtttggtcgccacgtgcgtagtacattactccagagtaccggcttgacggtaggggtggggatcgggccgacgaaaaccctggccaagctggcgaattatgcggccaaaaggtggccaaaattcgagggcgttgtcgatctctcattgccggccaggcagagaaaactgctggagaaggttgccgtcggtgaaatctggggagtggggcgacggattgcgaaaaagctcaatgacatggggattacgacggctcttcagctggccgagacgcccgcttcgctgatcagaaaacatttcagcgttgtaatggagcgcaccgtgcgggagctgagaggcgagtcgtgccttgaactggaagagtatatgccgactaaacagcaaattatctgctcgcgttcctttagtcagaaggtgattgaatacggggcgatgcgcgaagccgtctgcagccatgcggtccgcgccgccgagaagctgcgcgcggagcaccagtactgccgctatgtttcggtctttgtgaagaccagtccgttcgccggtcatgaagtctattacagcaaagacgccggcacgaaaatccacatcccgacgcaggatagccgggatatcgtcgctgcggcgctaaaatgcctggatactatctggcgggagggatgccgatatcaaaagtgcggcgtgatgctgggcgatttctttagccagggggtggcgcagttaggcctgtttgacgactatcagccgcgagcgaatagcgaacagctgatgacggtgcttgatttagttaaccgacgtgaaaaaggccagctctggtttgccgggcagggaatcgagcgcagctgggagatgaaacggcatatgctgtcgccagcctacaccacccgattcagcgatttgctgcgggtgaaactgtaggctggtatgaaagggagtggttatccggagcggcgctccggacgacaaaccgtcaaacatatcgcgcagcgcttattgcaggcccgccagttcatcggcggtcagcgctaaagtttgcgttgttccgctttcggcagactgcgctgcggcttccagtaccgccatgacggcgagcgcttctaagggcgataccgggttgctgattttgccggtcagcgcatcgcggacgtgaatatagtactgccgctgatcgcctcgtggcgcgctgatttcactggcgcgcaggttggcatcaaacaccaccaggctatcgtcgtcttcgccccagctttcgctgcccgggaccacgcccgccagcagctggctctcctgctggtcagcgcgttgtttgacgacgctacctttatcaccatggacggtaaagcgggatacgccgcccgcgaccagcatgctgcagtgcagaaccactttgtgctgcggatagttcagcaccacgtgcgcccagtcgttgatttccgcgccttcacgcagggtggcgatattgccctgcaccgactgcggcaggccgaacagctgcagcgtctggtcgatcagatgtggacctaaatcaaaccacaggccgctgcccggtacgttctgctcccgccagcggacgcgcacttccgggcggaatcggtcgaaatgggattcaaaatgtttaactttgccgatgagcccctgttcgataacctgcttcacgcccagataatcgctgtcccagcggcggttatggaataccgacagtacccgctgtttctcttccgcgagggcaatcagttcgcgagcctcctgcatatcgagggtaaagggtttgtcgacgacgacgtgcttgccggcgtgtaaagccagacgggcaagcggagcatgggttgcgttaggagaggcgataaccaccagatcgacatccggatgctggatggcctcttcaggcgatgcgatgacggtgacttctggcaggtcacgtttcactttctcttcatcacgcgaggcgacaatcgccagattcaggccgtcgacggactggatcagcggggcgtgaaaagttttgccgacgaagccgtagccaatcagggcaatattaatgttcttaccggtagtcataagcatctccgcgttattaagcatcagcgatatggagctgtattgagtcgttatccttcagttcgtcccaggggcgatcgaggaagagctgatggatgtcggcgagtccggcaaccagccagggctcgcagtgattcagtttcatatgatcggcaaccagccaatgttccgcgctggccgccagcatggcgcgcttgacttcagcatccgcctcctgactggcgctgaggccgaggtcggcgtggagcgcgcaggtgccgagaacagcgatatccgcccgatagcgttccagcagcgaaaccgtagcgctaccggcaaacaggcgctgctgcatatcccatttcccccccagcaaaataagctgaatatccgcacgggtgctgaagtgctgggcaatatctaaagagggggtgatgaccgtcattggaccctgtatctgggtggcgacggccagcacggtgctcccggcgtcaagaaacagcgtggatccgccggggatcttctccgccaccattttacctaagcgcttcttggtatccggtagcagggtgttcctgttctgccgattcatggcggagagattgagcgcgatagcgccaccgtggtttttctgggcgagcccctgtttttcgaggtcgctaagatcccggcgcagcgtatctgcagaaacctgcagtctgtctaccagctcactgatcgtgatctggcctttttcactaagtatatcaatgagatatttttgcctggccgttttatgcatcgtttgaacccgcaaaatgctgcaataacttgcataatacagcattttgcggaaaaagaaatcttcacaacgcgcggcgcggggatgagttaacgaagacttttatacgggatggctcgatcaagggctgaaatcaccgtttgaatccacgtgacgtcgaggcgataagtcgggattgcagaaaaagacaagagatgaatagtctaaaatgataccgagaaataacttgagttaatgagtgtgtttatatcaaaattcactatcagcagcgatagcgctggtttttgctagcgcttcgtcgtgagctggacttgctggcgacggtccggttggcagaaatataattcatatggatggcatgacgttttctcactatttccgtttgggttgaatgctgaaaatattaatcccggatggggcacctcgaagttaatcggtgagtggaatgcccgtcacgccagatagctattttacttaaagttcgttgagtgcccgttctcaggtcaaaaaataatgtttatgtatatcgtgttttttaaaacgacgatagctgtactgtgcgtatcgttagctatctggataatacttgatttactttcgtcagcaggctaaatcgatgttgaatattgttattaaaaataataatcagttctttaatttgggatttcattttttattgcaggcgctcttcccggaatactcattctctacacaggtcaccgcatcgcttaacgaacggctcgtgcgtgatgcagatgtcgtcgtactggatttatgccgcggggaagagttcgtatgtcatccagagttgttaaaccgtaaaccgggattgctgatcggcgtggttgccaggctaaatcatcgagggaaaggcgttttgccgctctgcttgaaggagatagtttttgttgggcgcgatgagaagctctctcaggttattgcgaaaattaaactttcatgggttctgacgcctccgtcagcaaaagaaaagctggcgctccggtgcgatagttgcccgcagagaacgctttccccgcagcagagaatcatcgcggcggcaatttatcaggggttaacggtgaacacgattgccagaaagctatcgctttgcaataaaacggtttttgcccacaagcgtcttattatgtctaaatttgatctacgcaatgatttagacctcgtactattgctgcgtcatctggataacgcacgctgggttgcgaaagataattcttaaacttgcaaaccggcaagatcgctctattcttattttgcttactaaaatggaggaaaaagcaatgtgtactaatttgcatgacaacgctcgtcaatacgcagaagagaaaaaatgaacggctcctgctagcctgccttcccgtcagcccagcgtctggcggcaggtgataatgcaggctagacaccgtattgcaaagttcatcagcaacccgccgccggcgggttctttttttcagccctcccgcttttcgccagtgaattcagcagcatgccctgattagctcttgcgtaaccgtcgcgtaaggctagactacggaaatgtgcatgagttaacggaggtccagtggacgccattaagggatcggaactgaacgtgccggatgccgtttttgcatgggtgttcgacgggcagggcggcgtaaagccgttggtcgatagtgacaccattgataaagagcatccttgttggctgcatctcaactatacccatgtggatagcgcggaatggctggcatcgacgccgctgctgcccaataacgtgcgtgacgcgctggccggggagagcactcgtccgcgagtgacgaggattggcgatggggcgttaatcacgctgcgctgcatcaatggcagtaccgatgagcgcccggaccagctggtcgcgatgcgtctttatatggatgagcgcttgattgtctccacccggcagcgcaaagtcctggcactcgacgatgtactcggcgatttgcgcgagggtaacggtccggttgacggcggcggctggctggtggaggtctgcgatgcgctgaccgatcacgccagcgagtttatcgagcagcttcacgaccggattatcgatctggaagatgatttattggatcagcaggttccgccgcgcggtttcctggcgctgttgcgtaaacagcttatcgtcatgcgccgctatatggcgccgcagcgcgatgtgtatgccagattagccagcgagcgtctgccgtggatgacggacgatcaccggcgccggatgcaggacattgccgaacgtctggggcgaggtctggatgagattgatagctgcatcgcccgcacggcgattatgagcgatgagatcgcgcagattatgcaggagtcgctatcgcgaagaacctatacgatgtcgttgatggccatggtttttctgcccagtacctttttaaccggtctctttggcgtcaacctcggcggcattcccggcaacagctggcatatgggttttgccattttctgcctaatgttagtcgttctcattgggggtgttacatggtggttgcatcgtagtaaatggctgtaaagaatcgtcttttgtcgcgatgatgatggtgaaaacccggcaatgtttgagcgaaatcaataaaccatctacccattcagggcaatatctctctcgcaggtgaatgcaacgtcaagcgatgggcgttgcgctccatattgtcttacttccttttttgaattactgcatagcacaattgattcgtacgacgccgactttaatgagtcggctttttttttgcgctctgtttctcagcttctacgcttaacgggtgtacccgcccacaaccgggagtcaatatgcgtaatgaacagctgaactcaattcccattccgccggaacctaacgatccggtaccggtccacgatcccaaacctcgcccgcgcccgttacccgatccgccgcctgacgatgagccgattaaattgtcgcatcgggagcggagatctgcgacgatacgcgccagcagattgtccgcccctaaatgtaatgcgagaaataattgtgaccgctttttcaactctgaatgttttgcccgccgcccagctaactaacctgaatgaactggggtatctttcgatgaccccggttcaggccgcggctttgccggcgattcttgcgggtaaagatgtccgcgtgcaggcaaaaaccggcagcggtaaaacggcggcattcggtctcgggctacttcagcacgttgacgcctcgctgttccagacgcagtcgctggtgctgtgtccgacccgcgagctggcggatcaggtcgccggcgagctgcgtcggctggcgcgcttcatggcgaatatcaaaattttaaccctctgcggcggccagccctttggcgcccagcgcgattcgctacagcatgcgccgcatattattgtcgctacgccggggcggttgctcgatcacctgcaaaagggcaccgtatcgttagatgccctacaaacgctggtgatggacgaagcggaccgcatgctggatatgggctttagcgatgccattgatgaagtgatccgctttgcgccggcttcgcgccagacgctgctgttttccgccacctggccggaagcgatagcggcaatcagcggccgcgtacaaaacaacccgcagactattgaaattgacgccgttgatgcactgccggctatcgagcagcagttttttgaaacctcgcaacacggcaaaatcgcgctgctgcaaaagctgttgagccagcatcagcccgcctcctgcgtggtgttctgcaacaccaaaaaggattgtcaggccgtctgcgactcgctaaacgccgccgggcaaagcgcgctatcgctgcatggcgaccttgaacagcgcgatcgcgaccagacgctggtacgctttgctaacgggagcgcgcgcgtgctggtggcgaccgatgttgctgcgcgcgggttagatatcaagtcgcttgagctggtggtgaactatgaactggcctgggatccggaggttcacgtacaccgtattggtcgtaccgcccgcgccggtgaaagcggcctggcgattagcctctgtgcgccggaagaggcgcagcgcgcaaatatccttgccgaaatgctgcaaatgaagctcaactggatgagtgggccgacgaatagcagcgttgtgccactgcaggcagagatggccacgctatgcattgatggcggcaaaaaagcgaagatgcgcgcgggcgatgtgctgggggcgttgaccggtgatatcggtcttgagggtgcagatatcggtaagatcgccgttcatccggcgcatgtctacgttgccgtgcgtcagggcgtcgcgcataaagcgtttaagcagctacaaaacgggaaaattaaaggtaaagcctgccgggttcgtttgctgaaataagcgcggaaaaggcgtctcaggcgcgtacctgagacgcaaagacgttattttacttccacaacgttcaggcgcagctcatccagctgcgcgtcatcttcttccggctgccagccggccggctgcatcggaatctcttcacgatcgaacgccagatcgccgccgtcaacgaccgcagagccgtgctgaatgcctttaaagtcgaacaggttgacgtcgctgagatgggaaggcaccacgttctgcatcgcgctaaacatcgtttcgatgcgccctggatagcgtttgtcccagtcacgaagcatgtcggcaatgacctggcgctggaggttgggctgcgagccgcacaggttgcacgggataatcggaaaacctttcgcctgggagaaacgctcaatatctttttcccggcagtaggccagcgggcgaatcacgatatgtttaccgtcatcgctcatcagcttcggcggcatccctttcatcttcccgccgtagaacatattcagaaacagagtctgcaggatgtcgtcgcggtggtggccgagggcgattttggtcgcgcccagctcagaagcggtgcggtaaagaatgccgcggcgcagacgtgagcagagcgagcaggtggttttaccttccggaattttttctttaacaataccgtaggtattttcttcaacaatcttgtattcaacgcccagctgctcaagatattccggcaggatatgctcggggaagcccggctgtttttgatcgaggttgaccgccaccagggagaaggaaattggcgcgcttttctgcaagttgcgcaaaatctccagcatggtgtagctgtctttaccgccggagaggcaaaccatgattcggtcgccttcttcaatcatattaaaatcagcgatcgcctcgccgacgttacggcgcaggcgcttctgcaatttgtcgatattgtatttttctttctttgtaacttgctgattatcaagcattataaacgttctctgaaacgaaaaggcatgtaaggggcaaagttaacatcacggtgcaagcctggcgtcaggcattgatagccgatcgccgttcatttcatccatccctgtactgtcgactttgaacaccatttattgcgttttcatgccccatctggttaacaatggttagcaccggcttacagcagccagcaggcaaaagtatgtcgcgtatggtacggattccgacgacgaatgccagcgcgttttacggcggctttccatctgctaacgatagtgcggcgaagttttggcctcaatcccccttccgggcagaaaaaaacgtcgtttataggcacgccagcgtcacatatccggtgatggacggtatctggtaaaagggtgcgagaatttattgttcgcgataatcaaaaagcgttggcaaggtacctcggtttttttaaagcaggggccttgttcctgcttttgccataatccgccaggatcgcgatataattatttgcatcctgataattacacagcgaaggtatttggcgcaggtgaataacagcggtaaagtttgagtaaaaataacctgctacagactgattccctacaacgccagagcagttgggttttttcctgataataatctgaatatgtgcctactcaatggggtttttccttgcaaaacgaagcgcttatccaatccacattcgaatttctcggattatgaataaggcaattacaaaaattgacagttgcctgatatttttatgagatttaaactttcactgcaacttatggattaactttgattatgggaataaaaatgaaaaaaagtaccgttgcagtaatgatgatagcgattttttcaggatcagcttatgccgagtcaatgcagctaagtccaaacttttctgcggaaagttttactgtatcgacgtctgcagggatgctgagtgggaaatcacaggagagagtttatgacgcggatacggggcgaaaggtcagtcaacttgactggaaaataaagaatgtcgccattgtgaaaggtgatatctcatgggatgcctactcctttttgacgctgaccgcccgaggctggacgtcgttggcttcaggctcaggacatatggatgactatgactggatgaacgataaccagtccggttggacagatcattcatctcatcccagcaccaatgtcaattatgccaatgaatacgatctcagcgtgcagggctggcttttccaggacgacaattataaagcgggcgtaattgcgggttatcaggaaacgcgtttcagctggacggctaccggaggttcttacaattatgataacggtgcgacgactggcaattttccgaccggtgagcgtgggataggatacagccagagattctccatgccctatatcggtctcgcgggtcaatatcgtatcaatgactttgagtttaatgccttgtttaaattcagtgattgggtcagagctcatgataacgacgaacactatatgcgtgaactgacctttcgcgagaaatcaactaattcgcgttattatggtacatcggttgatgccgggtattacgtcacgcctcatgccaaagtttttgctgaattcacctatagcaaatatgaagagggcaagggaggcactcagattattgacacctatagcggtgaatcagcttcaattggaggagatgctgccggcattgcgaataaaaactataccatcacagccggtcttcaatatcgattctaaatcattaccgcccgtggatatagccagcaaaactcgctaatcccggagcgcgcttaatcagtatggagtgtctcccgctctgggggcacgccattatccacggacatatcacccgaatgcttcagaggatggattgtggcaagcgcaaagggatcgcccaggaattgctaaaaaccggaggtaaacgcaaggcgcttatcctcgtgtgccggcatttcatttatctcttcgtatgctctacctgtggcgcaaaatccgccacgaacaaagatacgattcacgaatgcatcaggtaaccttcaggtaggggcgcgaaaagatgagtttgtccgggcgaagagaaggcgattgaaccgaaagggaaatgggcaggcaatgaaatgatgatgcctgccgccggcaattatttagcgcaatagacgcgcgcttcacgcggagtataaatacccagggtgacaaaacccagcaggccgttgacaaaagtctgctgcacttcagtacggactactttgtcggcgccgccgcagactttggcagcatcaatttgcttcgactggccaatgccgctgacaaagaagtggtgagtggtgacctgctgaggttgaacggtgacgccaggatttaccgagaagctctgctgggcgcaaccagaaatagcggctgcggcgaaaactaccataattaactttttcatttcatccctataattgttgtaaaacatacccatgttcgggcaaaggttttatacagcaaaatgaaaaagacacaacgtactaattttaatagtaccaggtaaattattcccctatctgcgatgctgcgggtacggcccagtgctcagattgcggaaaaaaagcccgcacagcggcgggcagagtaggtttaccgcacgaccagcaccgaacattccgcatggcggacaacggcggcggcgttagagcccagcagataggtggtgatatcgggacggtgcgaagagataatcaccagatccgcggggagagacttcgccatagcaaggattttatcttttggcgagccttccgaaacgtgtaaatggacacggtcttccggaatagtaaactttttcacaatctctttcagccgcgattccgattcggctttgaggtcatccatcgccggcagctctgcggtgtaagccattcccagcgaagcgtaatagggaagggagggaatgacggtcaggaaatgcacctcggcatcatcgattctggcttcagcttcaacatgcttgataacgcgatcggttaattctgtatcggaaatatcgatgggcacaagaatcattctgttcataaaacctcctgtttaagtaaccacttaaagtgtaggccatccagttgattattgtacattgagcgcaatcacactttcgccatcaggcacggcggcgttcagtaaattttcctttgatcacgccgtcgtaaaaacggcctttagaaaccacctggagaaagtcgcggaaaatgcgcggcgggacgccgagatactgtagggttttgttatcgcgaaaacgaatttcaagaataccggaggactcatcgtaggcgatggaatggatacgggatgatttcacgggatgatggtgcatggcgggcgtcctctacggctacggcggttcctggtagcaatataacattcatcggtcgattattttaaagcaattgatatattgttttgctttgaatgcagtcgatggccgggaggggaagtgaaagcccgccgttgccagcgggcccgcagattagaactggtaaaccaggcctaaagcaaccacgtcatcggtagagatgccgttgttggaatagaagctatcgtcttcgtccagcaggttgattttgtaatcaatgtaggtggacatattacggttgaagtaataagtcgcaccaatgtcagcatatttaaccagatctttgtcgccatcggttttgctcaaatctttacctttagacatcaggaaagagaccgccggacgcagaccaaagtcgaactgatactgcgcagtcacttcaaagttctgggttttattggcgacgccgttgccgttaccgtatggcgtcatgttgcgggtttcggaatacatggttgccaggtaaatattgttggcatcatatttcaggccggtagtccaggcttccgctttatcgccctgtgcggtagtttgggtcatctgatcgttggtacggtcagaagaggtgtaggcggcggcagcgctgatacccataccgaaatcataagaagttgacagaccaaaaccgtcgccgttggcgttacgtacgctgcgatcgccgttgttggtgccttcgccgctgccggcgttttcatttttaccctgatactgcagggcgaagttcaggccgttaaccagaccgaagaagtcattgttacggtaggtcgctacgccgttagcgcggccggtcataaagttatcggcctgggtgtaggagtcgccgccgaactctggcagcatatcggtccagccttctacgtcgtacagtacgccgtagttacggccatagtcgaatgaaccgtagttagcgaatttcagacccgcaaacgccagacgggtccaggactggttgtcggcgccttcggtgttgttcgcctgaacgttatattcccactgaccgtagccggtcagctgatcgttaatctgagtttcgcctttgaagccaagacggacgtaggattgatcgccatctttagaggaatcatcggagaaataatgcagaccatctaccttgccatagaggtccagtttatttccgtctttattataaatctcagcagagtgagcagcgccagcagctaacaatgccgggataacgagggccagtacttttcttttcatttagacaatcctttaacggtttttgttttagcttcctcctgggaagtgaactcatgctaaatgagcaaattaagatatggtaaatatcaattgttacgatatgagtaaaatctaaaataaataattcaactgaaatggtgataattataatgaatgattttgtgaaatacatacaaaataaaaattatacacggtgattttaatatcgtattatccgcccgttatatgccttttattgtcatctaagaatttatgttgccctccgttcctgagaatggtttttattgagcggtaaaatgacaagcccgaatgaatattcgggctttttttatgagtgactaaaaaaacgtcagtaaattagctttcggttgccggtttttccaccttaccggccagctgggcaaggaagtcatagcgtttttgtaaatccgccgtcgcatccttccacagctgttccgcgacttccggctgctgcgcgttaaggcggcggaagcgctgctcgttcaggagcgtttctgccagcgcgtctgacggcggacgggagtccagcgccagcggaagtttaccttcatcggcgcgacgcgggtcaaagcgatacagcggccagaatccggtcgcggtcagctgacgcatctgatcgtggctcagcgccagatcgtaaccgtgttcttcgcaagggctgtaggcaataatcagcgacggacccggatacgcttccgcttcctgaatcgcttttaccgtctggtttagctgcgcgccaagggaaatctgcgcgacgtaaacgtggccgtacatcatcatgctgacgccgaggtctttgcgcgccttgcgcttaccgtgttcgccaaacttggtgaccgcccccagcggggtggcttttgatgcctggccgccggtgttggaatagcattgggtatcgagcaccagaatattgacgttttcgctcaggctcagcacatggtcaagaccgccgaagccgatatcgtaggcccagccatcgccaccgattagccagatcgatttctcgaccagcgcgtcggcgtcggttagcagctctttcgcgtcggcttcatttgccagaaccttacgcagctcggccacctgttcgcggcgtacttcaggcgttgcttccgcgtgcagcgcgtcgttaagcgcgggcggaagtttatcggcgaactgcgacagcagacgcattacgcgctgacggtgctgatcgacggtgaggcggaaaccgagaccaaactcggcgttatcctcgaacagcgagttagcccacgccggcccgcggccgttggcatcggtggtgtagggcgtggaaggcaggttgccgccgtaaatcgatgaacagccggtggcgttggcaatcagcatccggtcgccgtagagctgagtcagcagcttgatatacggcgtttcgccgcagccggagcaggcgccggagtattcgaacagcgggctgatcagctgcgaggtgcggatatcgatacgttccagtttgctgcggtccatttccggcagattgaggaagtagtcatagttcactttctcttcttcaacgtgttcaaggcgcgacatcatattgatggccttgatttccgggttctgcctgtctttggccggacaaacctcgacgcagagattacagcctgtgcaatcttcaggcgcgacctgcagaacgtacttctggccgcgcatatcgcgggctttaacgtccagagaatgcaggctggccggggcattttccatcgcgtccggggagaccactttcgcgcggattgccgagtgcgggcaggcggccacgcagtggttacactgggtgcaaagttcttccttccagatagggatctcttcggcgatattgcgtttttcccagcgggtggtgcccatcggccaggtaccgtccggcggcagggcggagaccggaagcgcatcgccgagcccggccagcatggcggcggtcacggttttgacgaaatccggcgcggcgtcggagacgaccggcgggcggttcgggctgttggcatcgacctgctgcagcggcacttccgccagcgactcgcgggccagggccagcgcctgccagttgcgttcgaccagctcctgacctttgctgctgtagcttttagcaatcgccccctgcagctccgccagcgcgctatcgcccggcaggatctgcgtcagatggaaaaaggccatctgcatgacggtgttgatgcgcgctccaaggctacactcgcgggcgatttttgccgcgttaacgatataaaaccgcgcttttttctgatccagcgtggcctggacttcctgcggcagacgcgaccagacctcttcggcgccgtaaggcgtgttgagcaggaaaataccgccgggcttcaggcgttcaaccatctgatacttgtcgataaactgcagctggtggcagccgacgaaatcggcctgcgaaatcagataggaagaacgaatcggcttctcgctaacgcgcagatgggaaaccgtcaggccgccggcctttttcgaatcatagacgaaatagccctgcgagaaccacggcgtcgagttaccgataatcttgatattgtttttggtggccgagacgctaccgtcgctgccgagcccgtaaaacagggcttccagcttcgcctccgacggcagcgtgttttctaccagcggcagcgaaagattggtgacgtcatcgtagatgccgacggtaaagcgcggcttgggtttagcggcgctcagttcgttgaatatcgccaggacgcactccggcccgaactcttttgaagagagaccgtagcggccgccaatggtacgcggcagggtttctcgctcgccgcggttgaaggcttccgccagcgcggtcatcacgtcgagatacagcggctcagcctgggcgcccggttccttggtgcggtcaagcaccgctacggcgcgggcgcttaccggcagcgcttccagcaggtgggcagcggagaaggggcggtaaaggcgaactttcagtacaccgactttttcaccgcggctcagcagttcatcaactacttcctcacaggtgccgattgcggagcccataatcacgataacgcgctcggcctgtggatggccgtagaactcaaacggtttgtactgacgcccggtagcggcggcaaaatcgttcatcgccgtttcaacgtgcgcgtaaaccgcgtcgtaccacgggttagttgcttcacgtgactggaagtaggtatccggattcgctgaggtgccgcggattaccggatgttcggggttcagggcgcgctggcgatgttcatcgattttatcctgcggcagcaggctgagaagggtatcgtccgccagaggggcgattttgttgatttcgtgcgaggtgcggaaaccatcaaagaaatgaataaatggcacccggctttgcagcgtggcgatatgcgaaatcagcgcaaaatcctgggcttcctggacgctgctggcgcagagcatcgcgcagccggtctgacgcactgccatgacgtccgagtgatcgccgaatatggagagcgcgtgggttgccacggtgcgggcggcgacgtgcagaacaaacggcatcagctggccggccagtttgtacagcgtcgggatcatcagcagtaaaccctgcgatgaagtaaaagaggtcgagagggcgccggtttgcagcgcgccgtgtacggcgccgattgccccggcttccgactgcatttcgacgacgcggggaacatcgccccagacgtttttcagcccgttgcccgcccaggcgtccgcctgctccgccatcgtggagctgggcgtgatcgggtagatggcgataacttcactggtgcgaaacgcgactgaagcaaccgcgccattaccgtcgatagtgatcatatcaatactcacattgctaaatttttgataaaaaagtttttatgcccattgatacacgctgagctcttctgcgaaaccgctatcggcgcgattccaccggtagcggataagttcgtctctcacctgcctggtaacggggttgcgttacctgcatcgctacgggcagggtgaccgggtttgtgaatcactgtttaagtatagaccccagaggaacatgattttttgatctccagtagcgacaaaatccatagttcagataaattaattcaaggtattacataggtgcctacgtatgaacgacaccctacaccaaaatcagtggcgtcatttttccataagtagcagtgtggcgaattccgccagtcaaagcctcctggccgacaacactgccttaattacctgtaggtaatttattcgagttttgctatattttagatacctgatggtaaatggcgttagaatcattgcgatggataaatacgaaatcagacgacagcgcttgctctatatccgtgataatttatgcggcggtaaggctgttgatgtggcccgaacccttggacgggagccttcttacgtctcaaggatgctctaccccgaaggcaaaaagcaaaagaaaaggatagctgacgagatggtcgaacttattgaatcttcgttcaatctgccccgtggatggatggacggtatcaccgggaatattgatatcgagcgagaaccggtagaggattcgccgcagatgccatatgtcattgaggttctggatgcccaggccagcgcagggccgggctgcattgtctccagtgaggttgatgaaacggtgaatagcatcacctatgactctgccggcgcgctgcggctttttggtaaccggcccgcagagcatatcaaggtgattaccgtctccggcgatagcatgtccggcaccattgagaccggtgactacatttttgtcgatgtctcgaaagactactttgaaggtgacggcatttatgtcttttcttttaagggcgcggtgctggtgaaacgtcttcagttcacggcggatgggctgctcgttcactcggataacagcaaatatgcggactggacgattggcgaaagccatgaacagtatctgaagatcattggtcgcgtgatttatagccacagcgttaaacgctttgtttaaaggcgttcattgccgcgcagcttcgccatcctgtttctgtcataaaccctgagctcaaccataagcattacccgggtatgccacctgtacgccgggcatacctgcggcttctcaccccaatccagggacacgctgttcaacactacccgcctcggaccttttcagctgtttttacgcggcataccacttttttcaaaaatattttcaatattttcaagtgtttaatgtgttttcttcataaagtatacctataggtatttatttttaaataaccctgaggtattcttttgtcatcagcttgatagacagcactatccggatgatgaaatacaacgattcataactgaatctacgtggctgaaaagccagcgccatggcgcagtgcgctttggggggaagccattggcaaggatccgattgccgatgacattccgccaaagcccattaaaggagaccgcaatgtcccgtaaaaccgcgtttaatggctccgctgcgggtcgacgtcgcgcgcagcgttcccacttacaaaatccgcaaacgctcagctcagatcttatccaccggcccactccgtcccgcgctcagattcaggcaaaagggaagcaccatacgcctgaacgtattgaggacgcattgccgattaaatttgtggcacaggatattttttggcagcgcgaagaatataaacggcaaattgagcgagcgaccatcatttatcagcaagaatttgcacaccagtatgcgcagccaggaacctggctcttccagagggcaatttatgcgcttggtttgcaaaaaagaaagaaagtaacggcgaggtaacgccttagtgccaggaaaaatgaccctgcgcttcgttatttaccatcataactcatagtgaaagaagggagggtatatgtccgatcctgtttccggtacgtcgataattgttgctggtggattaatgggcgctggtatgtttggcctggtgacaggtattgattatggcgttgtttttggggcttttgccggcgcggtattttatgttgcgacggcagttaatatcacgcgttttagactcgctgcctattttatgacttcttttattgtcggcgttttgggttccgggttaattggtacgaagctggctatctggaccggatacaatgaacggcctttagacgcgttaggcgccgtgctgatatccgcgctgattattaagatactcacgttcctgaataatcaagaactaaccgacctctacaaaatactaacccgcaacaatagtgggcgcccgaatgggaaatgaacttcccgcgctgcttaatgccgttctctgcgctttgatcaccctaaccttaatgttttatcggcgcgcccggtacagaaggtatcgaccatggatatcgtatacggcttatttgctggtaatcacttatgccagcataccgtttcgttatctcttcggcttgtatacgtcgacccactggttggttgttaccgtgaatttttttgtctttattgccgtgtgcctggtgagggggaatattgcgcatttaatcgataaatgaggaataaatgaataaagatgagatttttaatgccattctggaaaaggagggcggttatgtaaatcatcctgatgataaaggaggtccgacaaactgggggattactcaagtcaccgcacgggctcatggttatgatggcgatatgcaaaaactgacgcgccaacaggcgctggatattctcaacgctgactactggattgcgccccggttcgatcatgttgctgaaatatctaccgcgatcgctgaaaaactgtgtgacgccggggtcaatatggggcctgttctgccgggtaagtggcttcaacgctggttaaacgcttttaatcatcgtggagtactttatccggatcttataaccgatggtgttattggccccaggaccttaaatgccttgagccattatgttattcgaagaggcagtgaaggggagcttgtactgctacgggcattaaactgtagccaggggcagtattatctggagttagcagaaaaaagtgaggctaataaatcatttatatatggttggttaagggctcggatagctatgtaattttctgttttattaatctaattcgttcagtaactgaaatctggagaaagtaaatatgtatacatctaatgatttaaccctctcaatgttttactcatctgccattgctgaggaaactggtaataaagtcgcaacgctcaccgttcaaaccatggggccatcagcggaaattttacaaatcagtaagttgcactgtattactgatgaaaataaagcgaaacgttatagtattggcgagcagtttattgctaatggctccgactctcttctcgccgctatcgaaacctggtggcgtgataattctgcggctctcattgaagagttaatgattgaagttatggattttattttgagtaatgttaaccaaaatgcaacctggatcggccagtatggtatgaaaatttttgaaaatgagccggtggcaaaacgtatccctgatagcgtattacagaacggcagccacaccaattcctgaaaagtgatgtggtgttaaagcgtaatcactatggcgcaacaataagtcataattaaacaagctattcgcattgataaaatgcattcaaatatttaaatatcaataatggagatattattatgggttttgctctgcctaatggctcaaccgtttttgttggttccggtcttggttctcccgtatctgtgagtacggtttccaatgctgaaggtgcggtatttaccgttgctgaaaatcataaccttaaggttgatgatgtcgtgctgatttcttcgggttggggtgtaatcgatggtttagttgccagaatcaccgcacaaacaacaaatagcgtaaccatttcggtcattaactccagcgaccgaaattttttcccggctcatgccggtggcgggaaattacagaaaatcacggagtggactgagattccacagattacggaagtcgcacagtcgggtggtgaacagcagtatgcacaggtacagtttctggcagacgatcgccagcgtaatattggcacctttaaggcggctaaaagccaaacctttaccttagcgcatgatgcttctttaccgatctataaagtattgggcatggcggatcgctacggtcaggtgttaccgctacgcatgtttgtgcctaatgcgaaggagtatcgctattggtctggcgttccgtcatttgatccgcaaccagtgaccgcggtgaatagcgttgaaaccgtacaagtcgcgttctccattcactctcgggatattactttctacaaatcggaagattaatcgttctccttctctgtggaacataaattaaattcaactgggctcctgcgggagccttttttaagggtatttatgagcgctattttcaaattacaacctaaccctgtttttaaagctgatgttgctattcctcgtgccggtgaagaagacggagtgctgaattttacgtttaagcatcggccaataaaagaactggcagagctagaagatattgacgaaaaaacggtctgtgatttcttactggagatcgtcgacggctgggcattatctgaaccctgtacgcgagaaaatataggcgtgctggtagataactatccgggggccgttaaagcaataatggctacttattatcaggagctgacgggaaatcgcgaaaaaaactgattgcggttgcctctgcattctatacgcctgaaccatcagcggatgagctaagcgcattcggtctgacagccgaagactatgacgatgttgtcatcaacgtctggcccgatatctggcctgcgtttgtagtctttcgcgcggccagcacgcagtggcgcaccagtccaggaggggttatcgggctggactacagtgtcctcgcatggctcatgagggtttatgatatagctgatgaggtaaccgcaataaacgatattcaggtaatggaacgggtagccttgaatatcctgaataaactacagaactagcctgggttttagcagaagtatgttcacattattaatcaatgtaaaccagataagtagttggtttattctttcaggagataatcaatggcgggtgatacaacaataacactgcgcatgaataacagtgaactggaaaaaagcaatcagcttctggataaatatcaacagaaagtaactgtcgccagccgtaaaagtgaagagtttaataagacttttcgtgccgcaacagatatccagaaaaagcatacggatggcctgaaaaggttaatgcagacgttaccccttcctccagccagaatggggcccatacttcaggatatggtaaagaaatctgaggatgagacctacaatataacgtcaggctctaaaaattactgggattcactggcaggaatgggtagtcctccaaaagaagaactgggttatacgccaaaagtttttcgcccaggcgcaaatatggaagagcgttctgacgatgatacggaaaaaggggggaagagcgattggctcggcggtttaatggcaggagccaaagaggcgtgggataaattccttaaggatggagaaaacgttcatggcaagcttaaggatttagctaaagacgccttcagctcaatgggaaactcgctggtggaatatataaccacaggaaaggcgaattttagtgatttcctgatgacctttctgaaagggacgctgaagatgcttagccaattattgttggtaaaagccatgcaggcttcctttaacgcgatgtcgaattctggcattggctgggtagcatccatcggtaaagttttcacgggccactccgagggcggctataccggagacgggggtaaatatgagccgagagggattgttcatggcggcgaatttgtttttaccaaagaggcgacctcggcgatagggattggcaacctttacgccatgatgcgcggtgcgcaggggtatgcgggcggcggctatgtgggaacggcatcaatgcagggactgggttcttctggcgcagggccactgaccattcagacctcagtacttattcagaatcagggctcagaaccgcaggcggccgacaataacggcgcgttaaatcgcgcctggcagcagacgatagaccgttccgttcgcgctggtgtggcaaatgaattgaggcctggtggccttatctggaatgcaaaccacgcacgttaattttttgattcccggagaaaatatgacaatagaaacctttacctggcgaacgcaaatacaagcgggtttgcagggggattttaatttcaccgttcgcgaggctcgttttggcgacggatatcagcaggtcgtcggcgatggtctacattttgaaaaacaaagctggccagtgaccttgaccggagaaaaggaagagatattagccgtgcttgaatttatgcggcgtcatgtaacgaagtcgtttatctgggatacccctgcgggggaatccgggctttatcgtgttagcgccgattcactaaaactttcgccattatcgagtcaagtaatgacggtaaccgctacatttaaccaggcatatgcaccatgattacagctgattatcaaaaacttgaacccgggagtgaaatacgtttactggaaattgatggcagcgtctttggcatggatgatgtcttatatttccacgggcacagtatcgcccatagcgaagctgaaatccaggctgctggaggggacgaaacgcgtttgcctgcaaaatccatttggtggcagggcaatgagtatatgccatggccttgtattattgacgggattgaatcctctaccagcggtcgggacgcgcaaccatcgctgaaggtggcaaatattgatgcttcgattaccgcgctgtgcttgtattacgatgacctggttcaggcgaaagtcaccattcacgatacgctggcaaaatatctcgacgcacgtaatttccctgaaggtaatgcgagagccgaccccacgcaggaaaaacgaaaagtcttctttattgatgccaaaagtgaggagaccaatgaagcgattgagttcactctttccagtccaatggatttgcaaggaataatgatcccaacgcgtcagctgcattctatctgtacctggtgtatcaggaataaataccgcagcggcgatggttgtgattatacaggccagcgatattttgataacaataatacacctgttaccgatccggcgctggatgtttgtaacggcactttgtcggcctgtaaattacgctttggtgaagacaatgagctgccttttggtggttttcccggcacgtctttaattcggagttaacatgcgccagaaagttatcagggctattcaggtgcatgctcaggagcaatatcctcgagaatgctgcggtgcgattgcccaaagggggcgggtagagcgctatttcccctgtcgtaatattgccgatgacccccaggagcattttgttcttgcgccggaggattatgcacgggtagaggattggggcaccgtaacggggatcgtccacagtcaccccgacgcgacgacccagccaagcgagctggataaggctcagtgtgacgcgatgttgttaccctggcatattttcagctggccggaaggcgattttcgtaccatttatccgcgaggagaattgccgctgctggaacgtccgttcgtgcttggccattatgattgctggggactggtaatgagctattttcgccagcagcataatgttgagttgacggattatcgtgtggattatccgtggtgggaagatggctaccctgataacttttatcatgattgttggtatcaatgtggctttcgcgagtttgatggcccgccgcagccgggagatatgattatcatgcaggtacaggcaaataagtggaatcatgcgggtattctccttgagggaaatatgctgctgcatcacctgtatggtcatttaagccagcgagtgccgtatgggggatactggcaggaaagaacggtgaaagttttgcgctatcatattaatgataatgcgttgaataatgaaaaaatctgaaagacgttgggattttaaatcacccgatatgaaatgcgttagcaagtgaatgtgattcaacatcagagggctggacttgctctcgagtcaactcagcgtacgatattatcaatggcggaatagatgcttatgatttattcataatgtctgctgcagatggagtatttatgcaagaacatatggtcagaatagagttgggcggtattcttggtaagaaatttggcaaatctcattgtcggatggtggcaacggcatctgaagcgataagggctttatgttgtactatcaatggatttgaaaaattcatgaacaacagcaaagctatgggattaacctatgctgtttttaaaggaaagaaaaatattagcgaggatgatattcctttccccatcaacgataaagtaatacgaattgttcctgtcgttattggtagtaaaaaagctggcgtgctacagacgatattaggtgttgcattgatcgcggtcgcttcaatcgccactatgggcactggagggatattcgccgcgattgctgccggctccgggtggggaagtgccgcaatgctgggggcctcaatggtacttggcggtgttcttcagatgctctctcctcaggttccaggtttagccagtcaacaatctcctgaaaataaagcctcctacgcatttggcggggtcacgaacaccaccgctcagggatatccggtaccgttgttatacggcaagcggcttatcggcggggcaattatttcagcgggaatttatgtagaagaccagcagtaaaatatccggcttctctcatttcagaccacctttgaggtggtttttttatggacaaaatatctatgacacagcatctcattaaaggttgtaagggcgggagttcaagcccgcgtaccccaacggaacagcctgatgatttacagtctgttgcgaaagcaaaaattctcattgcgctgggcgagggtgaatttgccggtgcgcttaccgcaaaagatatttaccttgatggtacgccgctggaaaattccgacggctcgcaaaattttagcggcgtcgcctgggagtttcgaccgggaactcaggcacagaattacatccaggggatccccggttcagaaaatgaaattaacgtaggagtggaagtctccagcaaaacggcctggtcccgctcttttagtaatacccagctttccgccgtccgcctgcgcttaaaatggccatctttactgaaacaggaagataatggcgatctggtagggaacgccgtcagctatgccgttgatttgcaaaccgatggtggtagctggcagacggtgctggagagtgcggtaagcggaaagaccacttccggttatgaacgatgccaccgcattgatctaccccgggcgacgacgggttgggttttgcgcctgcgtaaagtcacggaagacgcaaatacctcaaaaactggcgatgttatgatgctgcaaagttatgctgaggtgcttgatgcaaaactacgctatcccaatacggccctgctttacgttgaatttgactctcgtcagtttaatggctctattccaaaaattgcctgcagtcctcgcgggcgggtgatccgcgttcctgataactatgacccggagacccgccaatattcaggcatctggaccggagcattcaaatgggcgtggacggataacccggcctggattttttacgatctgatcgtcagcgatcgttttggcctggggaatcgtcttacctcagaaaatattgataaatggacgttgtatcaggtagcacgatattgcgatgaacccgtccccgatggtaaaggtggggagggtaccgagccgcgctatttatgtaacgtctatgttcaggatcgcaacgatgcctatacggtgttacgcgattttgcggccattttccgtggcatgacctgctggagtggcgatcaggtgattgctctggcggatatgcctcgtgatattgattacacctacaccagggctaacgtcatcaatggtcgttttcactatgtcagcagcagtagcaaaacgcgctataccaacgcgctcgtctcatggtctgatccagagaatgagtatgcggatgcgatggagccggtttttgagcagccgctggtcgcccgctatggatttaatcagcttgaacttacggcaattggctgtacccgtcagtcggaggccaaccgtaaagggcgttggggaattctgaccaacaataaagatcgcgtagtgactttttcagtcggactggacggtaatattccacaacccggctatatcattgcggtagcggatgaaatgctggcgggaaaagtcaacggtggccgtactcgcgaagtggatggctgcgttattacgctcgatcgtaaaacggaagcgaaagccggggaccgtctgttattgaacctgccatcgggggggacgcaaggccgaaccattgagagtgtcgatggacacgtcgtcaccgtcaccgctgaatatgccgaaagaccagaaccggaatgcgtatgggccattgagtctgactctctgagggtccagcaatatcgtgttgtgggtgttaaagataataacgatagcacctttacaatttccgcagctgctcacgatccggataaatacgccaggattgattccggtgcgattattgatagtcgaccaatcagcgttattcctccagggaagcaaagcgcgccagctaatatcgttgttgagtcttattccgtggttaatcaggggattagcgttgaaacgctgcaggtgcactggacggcagtaaagaatgccattgcttatgaagcacagtggcgccgcaatgaaggcaactggataaacgtgccccggagttccgttgcctcgtttgatgtcagcggaatttatgccggccgatacatcgtaagggtgcgcgctatcaatgccgcggaagtgtcgagcggctgggcatattcgcaagagaaaacgttgaccggcaaaatcggcctgccttcggcacctgtttcgctgactacaacatcccttctgcatggcgttcaactaaactgggcgttcccggagggaagtggcgatacgcaaaaaaccgagctgcagtacagcccaaatccaaccggcaacggcgcgatggcgctttctgacgtaacgtatccgggaaactcgtatcagcagatgggcctgcagattgcggcgacgttctggtaccgggcacgcattgtcgatcgccttggtaacgaaagtccgtggaccgtctgggtgcagggaatggccagcgacgatatcggggagtattacgacaagctaaccgacgcaattaaagacaccgaagcctggcaagaatctcagcgggatatggaggaaacccacaaaacgctgacggaaaccgctgatgccatccgtgaagaggtcgagcagcaggttaacgaaataaaccagagcattaatgagaccgctggggggatccgtaagcaggttgatgggcagatagcgtcggtcaataagtcgatgacagagaatattgacctcgttaatcagaccctcaatgacgccatctcgacagtaaacaaaagcatcaacgatgctgtgagtgatattaatacttccgtcgaccagcagatagcagacgtcaataaagccctgacagcgggggactcggcgttaaaatcccaactgcagacggttgaaaacggcctgaaacagtccattgctcaggcaaatacgggctgggataaagcggtaaaacaggagaccgctgaccgcattgcggacgtcaacgcgaaagcggcgcaggcggcagaccagttgctgaatgaaaaaaatgagcggctggccggcattgataatctgcagacaattattcaggatggcgacgagtcactggcccgtcagatcgctgaaatctctgccggtagtgggcagcagtttgattcgttcagtatctggtacttcgataaagacaatgaagggtggaccgaggacgatgccggtcaggtgccgatgcaaatcacggacgacggctggctgaaagcatcgaacagcacggcatcctgccgttcgccaaacgggcaaaaaatcccgggttcctcctatcgcaccgtcatgctgcgtattaagcgcgtgggtaatccggcatggaaagggcggctttactggattggtacagaggaaaccggctggagtgatgcccgctcggtgactatcgccgagcaggagtttgatggcgaaggtatcagcgtggtggccatttccgacgtgaactggaacgcgtccggcacggttcgccgttttcgtctcgatctggcccaggcgcagaatgccgacaactattttctgatccactggatatccgttgggcgcccggcgccggcagcaagtacggcggccctgcgtaatgaggagatggcgcggacgcaagcggatgaggtagaggcgctgaaacgctccacactggcggcgcagatcaggggaacctctgacagtaacagccttgcagacctgcgttccggcctgctgtatcaggagatgaatgcccgtatcaccgccgataaagcagaggtgacggccagagaatcgctgcagacgcagttcaacgacaataaatcctcggtcgcggaggagctgagttccctgtcgaccacacaaagcgcacaggccagcaaaatcagcggcctggaaaccagtctgggtaaaaaagccgatgcaaccgcgctgcagtccctcacgcaaaaggttgaacagcagggcaccacgttaaccagccagggaaatacgctgacctcgctgtctaaccgcgtcgggaaaacggaatcgggcgtggccgcaaacagcaacgccatcacgggcctgcagtccagcgtcagccagcaggataaaacgctgaccagccagggcagcgcgatcgctaaactgcagaacgacctgacgataaccaattcaaacgtcagtaaaaaggccgatgcgagcgcggtcacggcgttaaccaaccgggtatccgcgacggaaggcaacctgaccacacagtctggccagctgacgatgctgaaaaacaccctggctgaagggagtctgattagcaacggcggcatggatgtggatctgtcgttctgggagaactccggtaccggctcggcgttcacttatgattcgggtgaaaaagccctgaaaaccacgactggctccattcgcgtcgccaacgtaacgcgtatccccgttgaggccggactgactctcacggtctcttttgagtaccgtacttcggaaacggttaacagcgtatcgtctgacaccgtcggtgtgatagcggatttaggtaatccgatcgcatggttatcgtctatatcgccgtggctgagtggggtaacgaccagctggcagacgaaaaccgtggaactgaccattccagcaaactttaccgggaattatgtctatctgcggtttgccgccgggggctgggcaccgtcaaacagtgcgcgtctgtatatccgtaaagtcaacgttttttcgtcgaccggggtgtcgaagaaggcaaatgcctctgccgtgactgacctgaccagtcgcgttgactcggcggaagggaagctggccagccagagtcaggcaatcacaaagctgcaaaatgacctgaccacgacgaactcgaatgtgagtaaaaaggcggatcaaagcgccctgacgtcactgaccggtcgagtggagaagacggaaagtggtctgactgcagcgaacagtaatatcacttccctcaacagctcaattagcgctgcaaaagctgcaggggatgattatattcctaacccggcgcttgaaccttcctacgaccgcatgggttatgacgtcgtttcagccactgctgccggtgtgcctgtagattgcccgtttgcgtatgtggttcgcctggccggtcgcgaccatgtacctaaaatcaacaatgttgcggtgactccgggtgatgttttcgagatgtcggcggaggttgcttgcggaaccggacaggcggattttaatctctatatcgctaatgccacttcagcgacaggtggtatcaaagcgagactttccggcgggaataccaaagtcaccgcagcgtggaaacgcgtgacatggcgctttacggtgccggccgatacgaattttatgcgtcccttcctgcaggttaaccagagttcaccctttggtacggtctggtatgcggcagactggcatctgcgcaacgttactgcagcgcacagtgcacagaaaaccgctgatgcaacagcaaaagcggtggactccctgacgacaacagtctctgtgcagggcgatacgctgagcagcatcggtagccggaccacggcgctggaaaacggtctgtcaacgacgaatgccagcgtcagtaaaaaagcggatgcgagcgcgctgcaattgttgcagaacacagtcaccgaacagggcaaaacgctgaccagccagggcagcagtctgacgaagttggataacagcctgaaggaaactgtcgcggctgttgatgccacaaaagctgatgccgatgcttcccgggcgatagtcggaaatctgttaacgaatccgtcttttgaacgaggtaaagatggttacagcggctggcaatcagcgacgtcaatactcacagcttcttcgccgcatagtggcacccaaattcttaaagtggttccaggcagcagtgtcgtctcgttgcttcagaagatttcgtttaccaaagatcgcacctacaaaataggtatcttcacgcgtgtttcaggtggaacaacaatgccgtcaggcaccgctggcaataataagctgcgtattggtgattctgacggaccactgaaggaggttcagtttaaccccgcgacgctgcccacgagttctgtctggcaggaaatttcgggcacatggaaagccacgaaaaccgcagtccttgacgtctcgctcatggtgctgctggcgacgggagagcagtattttgatgatttctatctggtagacgtgactgatgaaaccaatattgcggtcagcgccaccgccatcagcaacctgacaaaccgggccagtagcgctgaaggaaagcttgagagccagagtcagtccatcacaaagctgcaaaacggacttgccactgccgaccagaacatcgcgaaaaaggccgatgcttcagccgtcgcttcgttaggcaaccgggttactgaagctgaagagaagctgacgagtcaaagtaacagtattacccagctagaagcttcactcgatagcgctcgcgataccggtgagaatctggttgaaaactatgatttcagaaaccaattaaatgcgtggaatctgcagaatgccgggcgcattgtgtggggagcatcaaacggggagggtgctcccggtgtgataatcacgcatatgggtgacgcaagtaatcctggattaatgtcgaataacgctaaatggttcccggtaagttcatcacgccggttccgttttaaggtacgtgcaaaattaatctcaggttcaggtgggattttatgccgcatctttaattcgaagaccgctggtacttacacccagacgcaggctgttgtaaccagaaaagatggttttgaaacgctgacggtagatatacccgcgttgccggccaccaccacagacgcaaggattgctttttatgtatatccgtccgcgacagttgttgccgtcgacagcattgccgtttatgacgttaccgatgaaaccgtgggttcggccaacgccagcgcagtcagtgatttgacaacacgcgtgaccagtgctgaggcgggaatgacttctcaggggacggctattacaaagctgcagaatgatctgtcaaccaccaatgcgaatgttaataagaaggctgatgctactgcattaaacgcgttatctaatcgtgtaacgcagactgaaaaggatatcaacagccaggcggacagcattaccagcctgaacagcacgctaaatattaacgcccgcaaaggctcaaatccgtggctggacggaacgtttgaaacttatgacgttaatcagaacctgggtggatctgcgcgagttattagcggagtcagctactcgggcggcaaatgcatgcgcgtgacgcgtgcaccgaacactaccggtaacagcgacgacctaatcggctcacgtcttgccattcgcgacgcggcagtattcagggttgagttctgggcgatgatgccttccggtgaaaccccctcaggcggctgggtcaccgtggtcggcctcaacgtacaaaatgatgcgggcgcaaactcatggctgggagccgctaatgtcagcgaaacagcgctggccggtcgtgacaaatgggttaaattttccggatatgcaaaagccacagcgaaaggcgcgacgcgcgctgtggtctggatctccacgcgcggggcgaacggtagcaacacgccgggttataacctgtttatcgacgacatggttattacagatgtcaccgatgcttacaatgcgcagagcacggcagacgcgaccgcctcagctgttgattccctgacgacgcaagtctctcagcagggtgatatcctgacgagtgtcggaagccggaccaccatgctggaaaacgggctgaatacgacaaacggcaacgtcaacaaaaaggccgatgctaccgccctgcagacgctgcagaataccgtgacggaacagggcaaaacgctggccagtcagggtagcagcctgacgcagttgaataactccctgaatgatgccacggccagcctggctgctgatggtaaaattcccggcaacctgatttccaacggttcatttgaacgcggccaggaggctttcacaggatggggaagcgtcgggtccgttatcagtgcacaatcgcccaactacggcagtaaaatagcgatgtgtggtgtgggcctggccgggatctctcagaaagtaccggtcgtcaaaggcaacacctataaaatcggtgtgtttgcccgtgcgcagggcggttcagtcatgcaggatcagggtaataacaaactgcgtattggtcagtcgtccctgctgtacgatcgccagtttaacaccgcagacctgcccgccggctcctcatgggttgagctgtccggaacatggaaggcgacggttgacgggatggttgatgtggcgatctactcttccctgaagtctggcgcgcagtattttgacgacttctattttgtggatgtcacggatgaagtaaatatcgcagccaatgccggggccatcagtagcctgaccacgcgcgtgacgagcgccgaagggaagctgactagccagggtagcagcatcacgaagttgacgaacgacctgacgaccaccattaacaacgttaataacaaagcggatgccaccgcgttggctgctctgaccaaccgggtgacgagcgctgaaggaaaactggagagccagagcagcagcgtcacgtcgctaaataacagtattgcggccactcagtcggatgccgatgcagcaaaagcgattccggggaatatgctggcgaataactcattcgagcgcagttttgacggctgggttaactcaggctggagcatactggcggcgcagaaccctaagtccgggaagtacattatccaggcgacaaagacacccagcggctctacggcgtgcgatcagaacgtaaatctgattgcggggcatacataccgcattggcgcatgggtgcgcaagtcgggtgactttgcggtcagcaatgccagtaatactaaaatcagcatccgtaatagctcagggccgctgaaagatattccgataacaaccagcatcggaaccggctggacggagatctttggggactataaaccgtcctccgatgctgcactgactatttccctgcgttccagcctatcggccggttatctgtatgcagacgatgtattttgcatcgatgttagcgatgaagtcgcaaatacagcgaatgcttcggcacttactgccctgaacacacaggtcaaaattgacggaggaaatattgaggccaatacccgggagcttaaaagcctgaaagctgatttagggaccaaagcgatggccagtgcagtgagcgatctgaaagccgatgtgcagaaaatcgacggtacattaaatgctagcgtagggaaggtggatggcctggcgataaaggtcggagagctggatggtaaagttgagacccagggagagacgatagcggattcggaaggcaagattaactcgatgtactcaattaaagttgaaacaaaaggtgataagagagttggcgcagggatggtattagccagtgatggttcgacaagtgacatcatttttaatgctgatcgtttctctatttttaatgccaccagcaaagccgccgtgccggtgatgattgcggaaggtaacgagctgtatattgattcggcgcgaattaaaaacggcacgattgatattgccaaaatcacagatcgactttcctctactaattatgtggccggatggagaggctggagtattaccaagagcggaagtagtgaattcaataacgttgtggttcgcggtgaaatacaggctgatacaggtactttaaataatgtagttattaatgagagttgtaatatcctgggcaccgtaagggctaataagattattggagacgtcggctcgtgggcaatcaatattgctcagcaccgctcccgtcgaattgcgaaagcacaatgggcctggttcgatttgcttgctgttgatcgccagccgttcgagcaacgagtgcagcttttaggcgcgcttcgccaggacgactcaattaatattacgggtggaggtaaattaacggcaggtatggagtacaggagttatgaaggtggctcgttgagtatgggtaaactagggtactgtattctcatgctgggtaccggcgctacttcgggtggtggccccatgacctgtgcgctctctattgatggcgttttatataagcaggaaaatgagagtatggaaattcagtcaatggacttcatcgttccgccaggtactggccagactgttgtgcgctatgggtactatctggacagaaacggtggtatgacgggcgtaatcttgtcacgttttcacgcgtttgttatgcgtaattcaaatattattcgaggtgtttcaagtgattaaaaggctaagctctgttctaaggtggtgatttaccagaccacggattgcgcagtgagttaaatttaatagcctgaaatacaaaccgaaacggcgccctcatcatggatgacatagtgagggcgctttgcgttctgaaactgaggatgaataaaaggagaccaaaaaaatttgctaataaatgttaatacagcgcataaatacgtacttcgcctctcgacgcggcgcgctgagctgcctattatccttaggcttgttcattttaagatgtatctgaggggagagaagatgcgagctgcgtttttagtgggatgtgctgcgctgttactgtcggcgtgtagtagcaatgatgaacctgttcagcaggcaacggcggcgcacgtgtcgccgggaatgcgtgccgcgatgagcagctccggccaggcaaactgcgccatggttggcggctcgttatcggtcgcccgccagcttgatggctccgctatcggcatgtgcgcattgccgaacggcaagcgctgcagcgagcaggcgctggcaggcggaagctgcggtaactattaattcatcaggtcggcgagcttatacaccagcgtctggtcggcggtcgccagcgtcagctgcgtttccgtcaggtcgacctgcgcgccttcgcgcagcattttgctcagcgtggcgtccagcgcgttcagctgcgagtccgtgcagagcatgcgggtcatcgccagctcttcaaccttcagctcgccgtcagagactttgcccgtgccgctgaagcggttgcacatattacctgaaacagacatcttgcccgtaatgggcattttttcgccgaagctcagctcctgcggcttatccgcggcattcagcggctgcccgttaacgctggtcagcacaaaacggtgatgctgaagctgttccgctctggttgacaccttgctgttataaacgcagcccgatagcaacattccagccgccagcagcgcagcaaacttgttcatttagtctccataaatatttatcgtattaataaatgaagggaattgtaactttatcgcaggcgattactgtggggattatctgaatgtgccccccgcagaggaggagcacaaaagggaaaggaatatcagaccagcgcgttagggcaggtttcgcaagcatccacctgacgcaggttgtcgagggtggtttgtgaaatgctgatcagcgcttccgcggtcagaaacgcctggtgaccggtaaacaggacgttatggcaggcagagagacggcggaacacatcatcctgaatcacgtcattagacttatcttcaaagaacagatcgcgttcgttctcatacacgtccatccccagcgcgccaattttctgatgcttaagggcgtcgattgctgcctgcgaatcgatgagcgcgccgcggctggtgttgatgatcatcaccccgtctttcatgcgatcgaacgcggcatggttcaacaaatggtagttttcatcggtcagcgggcagtgcagggagataacgtcagactcccggtacagggtttcaagatcgacatactccacgcccatatccagcgcggcggcgcttgggtagggatcaaacgccagcagacgcataccgaagcctttcagaatgcgcagcgcggcgacgccgattttaccggtgccgataacgccggcggttttaccgtgcatggtgaaaccggttagtccttcaagggagaagttcgcgtcgcgggtgcgctgataggtgcgatgaatacggcggttcagcgacatcatcatgccgatcgcgtgctctgcgaccgcttccggcgagtaggccgggacgcgcaccacgcgcaggcccagctctttcgcggcatcgagatcaacgttgttgaagcccgcgcagcgcagcgcgatgtacttcacgccgtgggctttcagttcttcgagtaccgggcggctaccgtcatcgtttacgaagatgcacaccgcttcacagccgttggcggttttggcggtcttttcggttagcaggaagtcaaaaaattccagttcaaagccgtatgcatcattgacgtgctgcagatacttcttgtcgtactgtttcgtactgtatacagcgattttcataagacttttctccagtgataataccgtcacggtagcataattaaaataatcttacaaatgttaaaaactagtttaatcagcaggttatagtattaattctagagcatatcgtagagttaagaaatctctttaaaagacaatacgtttcattaaaagttgaggctcagcgcccctggcgccagcaggatcagaggccagagtaaacctgaactgacgttagcgagctgaaactgccagagagaggtcccgctggcgccggtgaccagcggtacggtggcgcgcagcggagagagaaagcggctaaaaaagaccgcccacccgccgtggcggcgcaggaacagctggccgcgagcgaggcgttcggcattaagccagcgtatacgatgcagatggtgccggtagcggtagcccgtcagccacgagagccagaatccgccgatggcgccgaggctggcgctcatccacattaacaaaaaatggccgacgctggccgatgccagggtgccgaacagcagcagtccggaggtgccggggatcagcagcgagataacggcgcaagatttcgtgaacgtcagcaggaaaaccatcagcaataccaatgaatagcggctctgagcgtattccatcagcgagataattaagtccacagcaccatccgtttacgttcgcaggtgtggaccagtgtcgcaggcgaaaactaaaccccggctaaatagccggctggtgaatcagatggcggcgactacgcttaaacgggatggaaactttaactcacaggtcgaacgtgccacaatagcggcctctcggcttttacttatttcgaatcaggatattagctgcccatgaagggtaaatataaagccgccatcgcgctattattagccctcgtgctgctaccgctggctttgctattaacgctcacccactgggtgcccacgctggcaggtatctggctaccggcgggaacccgaatctcacttaatgaaagcccgcgactgacgcgctccgcgctgcgtattccggatctgcgctacctggtcggcgactgcgaaatcgcgcgcgtcgccaatgcctcgctctcgcgtcccagccgctggcgtttacatatcagcgagctggatataaacagcgcctgcctgaacaagctcccggacagcgaagccgcgccgggggcgccgaaaaccctcgccgaatggcaatcaatgctcccttacagctggctgacgattgacaatctgcgcctgtcaccgtgggagaaatggcaggggcggctggtgatgtcgctgacgccgcagcagcaggatatcggctatgccggtaaagaggttaccctccaggcgcggctgcgcggccaggcgctgacggtcagtgatttttccgcgcgtctggtggaagatcaggcgccggtgaagctggtgggcgagtttcagatgccgctggtgccggacggtttgccggtcgacggccacctgttcagcacctttgaatttccacaaactcccggtcttgtcgatgccgagctggagtggcagaagaaccgcgggcagctgctggtcacgccgcgcggtgaagtggagccgatgcttgacctgccgtgggaaatcaccccggatcgtatcgtcatcagcgatggccgctggcacaccgaatacgcgggcaacgcgttgagcggccgggttgcgctttcgctgggcaactggcagcagggcaccgagcagatgcaggtcagcgggcgtcttaacgtgctcactcagggccaggccgggaagggcaacgccgtgctgaatatcggccccggtaagctgagcatggacagcagcgacatgccgctacagctgaccggcgaggccaagctcggcgatctgattttttatgcccgactgcccgcgcagctgagcgggccgcttaccgcgccggtgctcaattttcaccccggcgcgctgctgcgttcgcgcgggcgggtcatcgattcgttgaatatcgatgaaatccgctggcctctggcgggcgtcaaagtgacgcaacagggcgttgatggccgcctgcaggctattctgcgcgcccatgagcaggagatgggggattttatcctgcatcttgatggccaggccgacaactttatgcccgaccgcggccgctggcagtggcgctactggggcgatggccatttcaccccgatgcaggcgcgctgggatgttaaaggcgcgggcgaatgggttgatagcgccattgtactcaacagcctgtcgaccggtttcgataagctgcagtatggatccatgctggtgagtaccccgcgcctgacgctggaaaaaccgatccactggctgcgcgatgagcagcatcccaaactgaccggcgcgctgtcgctggatgccgggaaaaccaccttcagcggcggcagcgaactgccgccgtcaacgcttaagttcaacattgatggccgcgatccgacctggttccggttcagcggctccctgcatgcgcaaaaaattggccccgtgcgcgttaccgggcgctgggacggcgaacgtctgcgcggtgaggcgtggtggccaaaacagtcgctgaccgttttccagccgttggtgccgccggagtggaagatgaacctgcgtgagggaacgctctacgcgcaggtggcattctctgccgccgccgaacagggcttcgaggcgggcggtcacggtgtgctcaaagacggcagcgcctggatgccggataaccagatcaacggcgtcgattttgtgctgccgttccgctttagcgacgccacctggcagcttggcacccgccatccggtatcgctgcgcatcggcgaagtcgtcaaccagttcaccgcgcgcaatctgacggcggatctccagggcgcatatccctggagtgaagacgcacctttacagttgagcaacgtcagcgtcgatattctcggcggcaagctgaccatgcagcagctgcggatgccgcagcacgatccggcgctgctgcgtctgcaaaatatctccagcagcgagttaattagcgcgattaaagtgaagcagttcgccgtgtccggcccgtttaacggtgcgctgccgctgtggctggataacgataaatggattatcaaggacggctggttcagcaatccggggccgatgacgatgcgtcttgataaagacacggcagacgcgctggtggctgacaacgtctccgccggggcggccattaactggctgcgctatatggaagtggccacctcgtggacgcggatcaacctcgataacctcggcgtgctgacgctgaaggcgacgattagcggcaccagccgggtagaaggcaaaagcaatacggtgcacttaaactactcccatgaagagaatatctttgacctgtggcgcagcttgcgtttcggcgacaatctgcaggcgtggctggagcagaacgccaggctgcccgcgccgcgctgtcaggacagtcatacctgtaaggaacaacaataatgatcaaactattcgccgcctttctggccaccgcgctgctggcgggctgtacgccgcgtattgaaatcgcggcatcgaaagagccgatcaccatcaatatgaacgtcaaaattgagcatgaaattcatatcaagctggataaagacgttgagaatctgctcaaatcccgtagcgatctgttctgaggcgatgatgagaatacgactggtaaccgcggcgctggcgctggtgctgttcagcgctcaggcgcaggccctgaccctgaatgaggctcgccagcaggggcgggtcggcgaaaccctcaacggctatcttgaaccgctgcgtcaggataaagaaactcttgagctggtgaagcagatcaacgccgcccgcagcgacagctatcagcagctggcggatgacaataatctaccggtggatcaggtggcgaaaatggccggtcagaagctggtcgccagggcgcagccgggcgagtacgtgaagggccttaacggcaaatggctgaaaaaatagctatcggcagcgcttgcgatactcccccggcgagacgccgaagcgctgcttaaaggcggtggaaaaatggctatgatcgctgaagccccagctgtagccgatccccgccagcttttcgtcatcatgggcgctttgcagcgcgcgggcgcacaaatcgagccgacgattcttgatatattgcgctaccaccagccccttttccgcaaacagccgatagaggctgcgcaccgacatgccggtttcgctggccagccactccgggcgcagatgttccgcctgaatcgactcatcgattaacgccatgattttctgaaactgcttatcgcgccgggaaggctgggcctcctgatgatgcagcatcgggcgcagcaggcagacgatggcctccagcgccgctttgctttcgctggccgagagttcagggctgttcatgctttcatgcaacaggcgctggctgagctggaccatcggcaggcttttcgccagccgggtagcgatgctgatttcactgctgcgcagctgttgctccagcagcgatcttggcagcagcagggaggcctgacgcgaggtttgctgccagataattgaacagggacgagacgcgtcgatcagggtgatatcgccgctttccagcatcgcctggcggccatcctgctcgatcgtcgcctggcccgcgagctggaagacggtataaaaccaggcgtcgttatcgcgctggatctcttgtcgggtgcggtaaagattaatgccgcaggcggtcaccgtgctgactttcaggtcgccggcatagctggcgtcgatctcaccgtggaaattatcagccagcggacgggcggcgaactgcccgcagacctgattgatttttgctaaccaatgctggtagttctgcccacgatttgccgtactcatcgcgcatcccttgtaataataatgtttttgcattgttgcacttatgatgccggaggcaagggtcaacggcggagtatatgaaagaactattacctgctgcacattttctgtccgcctcatcgacttaattgcggcgcctgtcacagcggcaacagcgaatgtcacagagaaaaaagcgtgaatcgcgaccccggcataaactgaaatcactatccgtgaagaataaggaaggggtatgtccacatcacaggtcgcgctactcgccagcgtgcagcagtttttagacagacagcatgggttgtatctcgacggtgcgcagcaggcggcagagagcgaaaagcgcttaaccgtctgggatccggccaccggtcaggctatcgccagcaccgcggatgctaacgccgcggatgtcgatcgggcggtgatgtccgcctggcgcgctttcgtttcccgcagctgggcagggcggacgcccgccgaccgcgagcggatcctgctgcgcttcgccgatctggtggagcagcacggcgaggagctggcgcagctggagacccttgaacaggggaaatcgattaacatttcccgcgcctttgaagtgggctgcacgctgaactggatgcgctataccgccgggctgaccactaaaatcagcggccgcaccctcgacgtatcgatccccttcccgcagggcgcacgctatcaggcgtggaccaaaaaagagccggtgggcgtggtggccgggatcgtgccgtggaatttcccgttgatgatcggcatgtggaaagtgatgcccgcgctggcggctggctgctcgatcgtcattaagccgtcggaaaccacgccgctgaccctgctgcgggtagcggaactggcaaccgaggccggcgtgccggacggcgtttttaacgtggtgaccggcagcggcgccgggtgcggcgcggcgctgacctctcatcctcaggtcgccaaggtgagctttaccggatcgaccgctaccggtaaacagattgcccgcgtggccgctgaccgactgacccgggtcacgctggagctgggcggcaagaacccggccatcgtgctgaaagatgccgatccgcagtgggttattgagggattaatgaccggtagctttctgaatcaggggcaggtatgcgccgccagttcgcgaatttatattgaagcgccgctgttcgatacgctggtgagcggcttcgagcaggcggtgaagtcgctacaggtcgggcccggtatgctcgagagcagccagattaacccggtggtgtcgcaggcgcactgcgcaaaagtggcggcctatcttgctgaagcccgtcagcagaaggcagagctgattagcggtaacgtggggccgaatgcgcagggctactatattgcgccaacgctggtgattaatcccgacgccgggctgcgccttagccgggaagaggttttcggtccggtggtgaacctggtacgcgtggccgacggggaagaggcgctgcgcctggccaacgacagcgattttggcctgaccgccagcgtctggacccgcgacctgagccaggcgctgagctataccgatcgcctgcaggcggggacggtgtgggttaacagccatacgctgatcgacgccaacctgccgttcggcggcatgaagcagtccggtaccggccgcgatttcggccccgactggctggacgactggtgcgaaacgaagtcggtctgcgtacgctactagccgccttttccccggtggcggctggcgccttaccggggctacaagcgcgtaacttgcggattctgtcgccagtcctgcggcaaaatccgcgcctcgatacctcaaatccggcttatctccgtatgcccggtggcgcttttctccgggagtaaaccgtcactccagcaaggacgggtcggcgtcgatcatcatctccttcatctctgcaaaatgctggcgtgaaaagtcggcgatcccctcccagtcctgcgcggttttctccgccaccgcatcggagagcactttcagcggctgccccgttgaccaggcggtcaccagaatctggcaggcgcgctccagagtccagatatcatcgaaagcctcgccaatcgacggtgcggtcaccagtacgccgtgattgcccatcagcagccggcgcttgtcggccagcagcgacgccagacgcgcgccttccgccgtggtgtccgccatgccgccgtataacctatcgacggctacccgattgaaatagcgcgccgtgttctgatcgatcggcgggatatgcggcgtctcgaggcaagcaacgctggtggtatacaccggatgcaggtgcagtaccacccgcacctccggcaggcgctggtggatctgcccgtgaatcgcccacgccgtggcgtccacgtccgctcgccgggcgcaggcttcatcatcggcgtccagcagcagcaggtcgctggcgcggatgcgcgaaaagtgtttccacttcggattcagcaggaattttttgccgtccgccgagatggccgcgctaaagtggttggccaccgcttcgtgcatcccgagatgggcgatgatgcgaaaggtcgctgccaggtcgatacgcgtctgttcttcataagagcgggccatatgattactccgctttcggcatcagagtttgcagatcctctggcgtcggcgcctggaagttatatttcttcagcagcgcggcgtattccggcgtcgcgctgtatttcttcagcccttcctccagcgcggttttcacttcgctattgccttttttcaccccaaagccgttgagcaccggatagatcaaggtttcggaagagatggtcacccgatcgccaagcttgtcgatcacgccgcgcgccaccgccgcatcggtgatttgcgcctcaaccgcccgcgagagcagcgcctgggtggtttgcgggtcggtggtgtattcactgagcgctatcggcttcaggccctttttcacgcagtagtcagcggagagcttttgcagctgcgccagccatgacgtcgcccccattgaaccaattttgtggccgcaaaacgcttccggcgttttcggctgatagtcgctgcctttcagcgcgaggatcgcttcgccgcttttcagatagggcaccatatcgataaccttcagacgctcggcggtgatgtacatcgacgagttggtgatatcgaagcgtcccccctgcaagcccggaatcaaattcggaaaccgggtatcaatattcaccgcctcgcggcccatagctttcgccagcccggcaagaaactcgatatcgaaccctgcgggcttgttgttttccatatattcatacgggaaaaaggtcatatccgaaccggcggtgattttccccggctgctggaaggcctgagcgctaaaggacgacagggcgccagcggtgcaaaggagcagggcagcagggcggaaagctttaaaacgtttcatacaacctccagagagtgggcaaattacatgctggcgcgatcggtaccggcctgctggacgaaaaaggatgcgccgcgcggtttttgcggcaggcgtaaatgattcacggtactgcgcaccaggccgctctcttccccggcaaccatctgcccggcgtgcgcgctgggcagcggattttcgccgtacggcagggcatcttccgccgcgtagacgctgataaacagcgtccgcggcaggtcggtttcattggggctggaggcgtggagcagacgagtatgcataaagcacaccgatcccgccgggccaaaacaggcctgcggctgctggcagtgggtcgcttcaacctcccgatccacggcgccggtaaaacgatcgttttgccagtgggaccacagcggtccccgatggcttcccggcaccacgttgagcgggccgttctccggcgtcacttcgctgaccatcagcagggcggtgatgatgtcgtcgttgctgtgaggggtaaacagaaaatcctggtgccacttcacctgcgtggcggtgtgcggcagcttggagttgattttgctgtgatggaagcgggtcccgctgccgccgatcagctggccggcaatcgccgccattctcgaatcaagcgcggcctggcggtaggcggcggaaatctccgtgggggaactcacccggcgcagcgacggatgatggggcgcgtggtcgctttcgagatcgaaacgcggccgaccgtccagggtttcgccccacacttcgctatgctgtcggctctcttcgacccaggtgtcgaaatcggcctgcagcagcgcgatttcctcggcggaaaacacctcttcgacaaccagaaaaccctgctgatgaaactgttcgatttgccactgcgcgatcatatttttctcctttcgggaacggaggcgttaagccaaagagacatctttcaggaaggcgtccacgcgcggatgctggccgtcgcgcattgcctgaggcgtgtcgtcgcagaccacgcgccctttttccataaacacaattcggtcggaaaccttaaaggcgaagttcatttcatgggtgacgatcaccatggtgatgccttcatgggccagcgattcgataacctgcagaacctcgttaactttttccggatccagcgccgaggtgggctcatcgaacagcataatttgtgggcgcatcatcagggcgcgggcaatcgctacccgctgctgctggccgccggaaagctgatgcggatatttccacgcgtgttccagcatgccgactttatgcagcagttcgcaggcgtgctgcttcagctcgccttcgctggccagatggtgatagcgcggcgccagcagcaggttgccgagtacggtcaggtgggggaacaggttgaagctctggaaaaccatgccgatattctggcgatgctcgctgttctccataaaacgcggcttctgctgcccctggcggtcaaggtgaataaaaggctggccgttgattttgatctcgccgttatcaatctgctcaaggccgttcagcaggcggatcagcgtggttttaccggagccggacgggccgatgacggagaccacttcgccgggctgaatttgcaggctgacggcgcccagcacttcgacattgttataggctttatgcagctttgacgcctgcagcgccggttcctgcgcgacgctaacgctgcgggccattgccggacgccgcgcggtggccagctgctgcatttcttcatccaccggtcgcgtggtcttacgctgggtgacgtcgagccaggtctcgaggcgcttaagcaggaaatcaaacaccgtgacgatcaggatgtagtaaaacgccaccgccgccatggtctccatgacgaggaaattctgcgaatagaggcgctggccgaccattaagatctcggtcagggagataaccgacaccagcgagctgagcttgacgatggcgatatactcattagccagcgccggcagggcgacgcgcagcgcctgcgggatcaccacacgccactgggtgccggcatagcgcagcccgagcgcgcgggcggcttcgctctgtcctttgggaatcgacagcagtccgccgcgatgaatttcagcaatataggcggcttcgctcagcaccatcgccagcagtccggcccagaacgggtcgttcagcaccggggcgaaggagggtagcgcctgcggcatgttgtagacaaaaatcagcagcaccagcagcggcatgctgcgaaacagccagatatagaggcgggcaggcgcgttaaacagcttgcgcggcgactgtttggccagcgccagaataaaccccagcacaatactgaaagcccaggtcagcaaacttaatttgatgacggtccaggtggcctgccagaaatcgacatcgctgagcaggcttaacatatagttccagttaaacgtcatgggctatttcactcgccataattaacggaaattaaggcgattcccctgttctaatatggggagccgccggcgttcatcttgccatgacactatgctggcactcttcgaccggtggcaattagtaaatttttggcctttaagtttaaaaaaactatacagctatattaacctcagggaatttaacgcaattaatgagaaacagcattgaaacaacttaaaaacaatcacccttatttttaaacctgatttttcgtaaaatgacaatttgtgcaatattggggcgcgccgcgggcgaataaggtgcagggcgatgctttatggtgcaatacgcgaaatcaggcaaaaaaagagggcgggttattaaatagaaacggcggctatttgctgacgaggtaaagcgcaaacggcatggcacgatgcttgcaggctgcttatcgtaaaactaagcccgttcgtaataagacaatattttatcaatggtgaagcgatgaaccgatttaccctcaaacagcttaaatatttcgtgacggtggtggaaacggagagtatcgctgaggcttcccgtcagctgcacattgcccagccgtcgatctctattgcgattaaaaacctcgaaagtaccttcgaccagcagctgtttattcgtcaccacgcgcagggcgtatccctgacctcaagcgggcggcgcttctacgataaagccaaagagctgctgcggctgtcctatgagtttgagcagaactcgcgggcggataaagagctggtatccgggacgatttccgtcggctgctttgaatccgtcgcgccgctgtatatgccaaaactggtagcgggatttaaaaaaatgtatcccgaaattactctccagctctacgacggcgaacagcatgaactgatgcacggtctgcaccgcggacgcttcgatctggcgctggtctacgacctggaactgggtcactccattcataaagagctgctgaacgccccgcataaaccctatgctttgctgcccgcttctcatccgctggcgcagaaaaaatgcgtcacgctccaggaattaagccgggaaccgatgattttgctcgatgcggtccccagcaaaaactattttgtctcgatatttaaagagaaaggttatcacccggaagtggcctacagttcgccgtccatagaaatggtgcgctgtatggtcgggcagggattaggcttttcggtactggttacccgtccgctgtgcgatatgacctatgacggcgaaaagctggtgcagctggatattgccgacgaaatgcccgcatcgacattaattatggcgcatcttgccaataatgaacccacgcgtccgacgcagctatttatggattattgccgcagcatagaattaacgccgcatcagcacgcgtaatttaattaacgcgaccgcaagcgttattttcttgtcgcgttattcagcctcgtaaatttctattcagacgatcgttttataataatttaccatttcatcacacttacttaacctgagttctgtcaatcccggcggataagccggacaaccgtgcttgaaggacacagatatgacagagcagattacagagatcgataccctggtggtaggcgcggggcaggcgggcgtcgccatgagcgagcatctgacgcatcacggcattccgcatctggtgctggaaaaaaagcgcatcgctgaggcctggcgcagcggccgctgggattcgctggtggccaacggcccggcctggcacgaccggtttcccggcatgacctttcccggctgcgacgccgacagctttgtcgccaaagagcagatcgccgactacttcgccgcgtatgccaaaacctttaatgcaccgatcaaaaccggcgttgaggtctttagcgccgagcgtttaaacggccgtccggggtttcgcgtggaaacgtcactgggcgtgattgaggcgcagcgtatcgtcgccgccaccgggccgttccagcgcccggtgataccggccatcgcgccgcaggatagcgctgtacagcagattcattccgcacactatttcaacccgcagcagcttccggaaggcggcgtgctggtggttggcgcggggtcgtccggcgtgcaaatcgccgatgagctccgccgggcggggcgcgcggtatggctctccgttggcgcgcacgatcgcccgccgcgccgctaccgccagcgcgatttttgctggtggctgggggtgttagggctgtgggatgcggcggccaatcagcccggcaaagagcacgtgacgattgcggtcagcggcgcgcgcggcggtcataccgttgattttcgccagctggcgcaccagggaattaccctggtcggacagacgcacggctttaccgagggcaaagccgttttccgtgccgatctggcggacaacattcgtcttggcgacgcctcctatctggcgctgctcgacgccgcggatgagtatatcgcccgcaacgggctgtcgctgccggaagagccggaagcgcgctttttcctgcccgaccccgattgcctgacccagcccctcaccgagctcgacctggcagccgcgggggtgagctgcattatctgggctaccggctataccaccgattaccgctggctgaaggtcaacgcctttaatgaacagcagcgcccgcagcaccaccgcggcgtcgccagcgaaccgggggtctatttcctcggtctgccgtggctctcccgccgtggctcaacctttatctggggcgtctggcacgatgcgaaatatatcgccgaccagattgccattcagcgccagtatcaacgctatcaaccttcctgctaatgcctgatttgaggacgcaacctatgccaacccatacccgtattcggatgtttaacaccaaagaaacctatcccaatcagacgctcaataacgatctgtgccaggcggtgcgcgcgggaaataccgtgtacgttcgtggtcaggtgggtaccgattttgacggcaatttgatcggcctgggcgacccgcgcgcccaggcagaacaggcgatgaagaacgttaaacagctgctggaagaggccggcagcgatctgacgcatatcgtgaaaacgacgacctatctgatcgacccgcgctaccgcgaaccggtgtaccaggaggtggggaaatggctcaaaggcgtgtttcccatttcgaccggcgtggtggtatcggctctcgcgcagccgcagtggctgatggaaattgacgtcacggcggtgatccctgacgactggcatgcgcaggaggcaccatgaccctctctatttccgccctgtgcccggagtcaggtcaactgggcattgcgattagctcatccagcattgccgttggcgcccgctgcccgtggctgctggcgggcgttggcgcggtgtccagccagaacatcacgctgcccgcgctcggaccgcagatccttgccgggcttgaggcggggctcacgccgcagcaggccctgacgcaggcgctgggcgaagaccggtttagcgattatcgccaggtggcggtcatcgacgccagcggcgagagcgccgtgttcagcggcgaacatacgctcggcatctggcagctggcgcagggcgagaactgcgtggcggcggggaatatgctggccaacccgcaggtgattaccgccatgacggcggcgttcgaagccgccagcggcgaactggccagccgcctgattgcggctctgcaggcgggtatcgatgcgggcggcgaagccgggccggagcactcggcggctcttaaagtcgtggaggattacgcctggccagtggtggatttacgcgtcgactgggcggaagaacgcccggtagcggcgctggaagcgctgtggctggcctacgagccgcagatggaagcgtatatcacccgcgcgcttgacccgcgcgaagcgccgacctatggggtgccgggcgatgaataaccgcgtgcgtgagatcctcggcgcgctgctggcgtttgataccaccagccgcgagtcgaatctggcgctgattacctggatcggcgactttctgcgcgcgcgcggcgtgacgtcgcagctgttttatgacgacgaagggcgcaaggcaaacctctatgcccgctttgggccaaccggccccggcggggtgatgctctccggccataccgacgtggtgccggtggatggtcaggcgtggacggtgccgccatttgcccttaccgaacgcgacgggcgctactacggtcgcggcagcgcggatatgaaagggtttatcgcctgcgtgctggcgtcgctggaggcgtttcttgccgcgccgctgcggatgccgctgcacctggggttctcttatgatgaggaggttggctgcctgggcgtgcgcagtctggtggattttctccgcgcctccgccggcaaaccggcgctgtgcattatcggcgagccgacagacatgcgcccggtctacggccataaaggcaagctcgcggtgcgctgccgcgtggaagggcacgcctgccactcggcctacgccccggaaggggttaacgcgatcagctacgcggccaggctgatttcccggctggacgcgctgggtgaaagccttgcgcagcagcaggatagccggttttcgccgccctcgggcacgctgcaggtggggacgattcacggcggcgcggcgctgaatatcgttccgcaatcctgctggttcgactttgaaattcgctatttacccggcacgcgcccgcaggccgtgaccgacgccctgggcgattatgcccgcgagcagctgcttccggcgatgcgcaaggtggcgcagcgcagcgatattcatttccagacgctgagccactatccggggctgctgagcgacccgcagtcagagttcgcccgctggctggcgcagtggtgcggcagcgacgatttcaccaccgtcgcctacggcaccgaaggcggcctgtttgacgaggcgggcgttgcgacgctgatctgcgggccgggcagcatggctcagggccacaaggcggacgaatatatcagcatcccccagaccgaacgctgtatggcgatgctggaaaacctttgcgcctggatgcgcgccgatccctccgattctcttcgctgatttatcaacacaggatggcgactatgcaaaacccgaactccccgcttattgatcaacagaccgtcgaccgctggcaggccgacggcgtcgtgctacttaaaggcgtgttcacgccgtggatcgagagcctgtcgcgcggcgtcgccgcgctgatggcgaaccccagcgagtacggtcacgcgcgaacggtgatccccgaggacggctcggcgccgttttttcaggactattgcaactggcaacgaatcccggaatttcgcgattttgtttttcagtcgccggcggcggagatcgccgcggcgctgatggggtcgcagacggcgaagtttttccacgagcacacgctggtgaaacagcccggcggcagtacggtaacgccatggcaccacgatcagccctattactgcgtggaggggcggcagaatgtcagcctgtggatcccgctcgatccggtagcggaggcgatttcgctgcgctgcattcgcggttcccatcgctgggacgatgagttcagcccaacgcggtttaacggttcaaagctctattcccattcgcgctttaaagagctgccggacattgatgcccatcaggaggattacgatatcgtcagctgggcgctggagccgggcgatgcggtcgcttttcatttccgcacgctgcatggcgcaaagggcaattcaaccgcccgcgcgcggcgggtattttccgcccgttgggtaggggatgatgcgacattcgccgaccgcggcggcgtgacgtcgccgccgtttccggggcttaagcttcgcgacggagagccgcttgtcgccgatgagtttccgcaggtctggccgcggtagcggcggcagggcgggcgaggacccgcccatcttgcggcgaaaggttttcactcactgactgaggggattgaagctccttaattttttgctttaagggctaagggaggaaattgatatgactcggttactcgtggttatgatctcttagaaagacggtcagtacgtccttgggtggggtgacaccactttctgaaagtagccaacctacagcgccgcgatgatatgttccgtgaaacagcacatgattgagcatatcaaccgccttcatctcaccaggtccgccatcgacaaactggaatttaatggtttcagcaaggtcaacgggggacatagcattgacgtattgaatataccagtctgtacattcagtcattgttctcagaagttcatcggcagagggcgtctctggcgtgttcagtgcggtgtaggagtgcttctggccggtaatgttagcgcggaagatcatatcaaccacatgtatgtgattcattaatctgagcgtcagatggcgtttttctgcattcgcagacgcatcaatttttttaatcgcttgtagcgtttcaatatctatccagcgtttgtatctaaacagcgtagctattttgtcagtacccatgcgtcacctcttttatctattttgtgattatatcagtaacattcagtatcgctggcagggcggtactgttgctttagcgtaggccgccgtcaggtttatatgccgtttatgacgtcagccgatagtgcgactgcaccagtcccgaagggaagctgcggcttgataacagcgtcaaatcgatatccctggtcagggatccgaacaatggtattcccgaaccgagcaggacaggaacggtcgtgataacgatatcggcgaccagaccttcgcgcaggaacgactgtattacctgcccgccatccagatagacgcgatgcgcgttttgcgccgccaggtcagcaagcacttcccccggcgtgcggcttgagagctgcactttgcccttcagcgcctcgggaatggcggtatcggttagctgtcgggagagaaccagcacgggtcgatcgtaaggccattggtcaaaagtcagcgctttctcatagctcccccggcccataacgatccaatctttgtccgcgatgaatgcggcatagccatgatcttctgttgggtcatcgcgctgcaacagccagtcgatatcgccatcctgtcgggcgatataaccatcaagactgaccgcgataaaaacatgtgtggtgaccatcaagtgctccgtatacagcttatatttatgccgttgagtttagggggaggtgttttgtccacataatatgattcaagcttttccagccaaaatattcaacatgcggcgcaatggttccgctgctccccacaatagctgatcgccgaccgtcaggaccgagtagatcggttcattgtttagcgacattttcttgtaacgaccaatacccaccttaagcgaaccgctgatacaggccggtgtcagggtactgacactctcttccttgttattgggcacatagttaacccaggggtgggaattcatcactaattcggcaaattcctcttcgttgacttcacgcttgagcttaagggttatagcagcgctgtggcagcggatcacgccgacgcgtatgcataagccgtttaccgggatcgtaccgggagacaggcctaaaattttgttggtttccgcctcacctttccattcttcacggctattgccattgcctaaatcgctgtcaatccagggaatgatgctgcccatcaaaggtgcaccgaagttctgggtcggcatatcagcgctgttaatcaattcactgaccttattaactaacggaagcactgaacctgaggatgccagctcatccggagataaatggcggcttatgtaggcactttgcgcaatgagttcccgtacatactgtgcaccagcacccgatgcggactggtaggtcatcacactcatccattcgatcaagtcagcctttatcaacccagccagccccataagactcagcgtaatggaacagttgccgccgacaaaaagtttaatgccttctttaattgcacgatcgatattgttgcggttgacggggtcgagaataatgcaggctttctcatccatccgcagcgctgaagccgcgtcaatccagtagccttcccagccatggttaagcaaagcagggtatattgctttggtataatccccgccctggcaggtgatgatgatgtccatttcggccagcgcacttacggaattagcatctttaagtgtgtagctgacgccatcaatgacagggccggcggctcctgcactggaggtgctgaaaaaatgcgctgatatattgtcgaagtcgttctcttcgatcattcgctgtagcaaaacagaaccgaccattcctcgccaaccaacaatgccaacctgcttcatttgcttaaccctaattacgttatgagaatgttaattttcttcgaggcacgttatatctcattccaaattaaaggtcattacgaacaacatccgattccatcattattaaaatctttcatctggcatcagcgatttttatctctttcacagctaaaaaatcataacctgttgacctgcggcatttgtatttaaaggcaagaacaggcgtaagacatccgcttctggcacacaacagccagactgaacaaagccagggtttgcaatgagcggggagcggacgctggtttaccgcgccttgtcatggtaaatatctggcagcaagagccgtgcttcgttcagttaatatagtggaatcgatttttatttgaggttatagggaaaagccgctctatgatctttcctgtccctgatagttaatgaataagtaataaatgaaggttagcaaataatgaagtcagttcagccaacaatgattgccgccgccgaaactcgcggcggtaggggagtaatggtgactgacttccgataaaacagattctcacgccccgccaaacctgacggggaaggaaatctctccgttcagaacgttctgagacgtcaggaggcgcgactatagtctatccagctcatgtacagtacgttcattgacgatattgcccgtattcagcgtcgtttttggctcaagtaaaacgacgcagcactcttcagttaacgcttcaggacaatgctcggttcctttcggcacaatgataaactcacccgcttcaagcacgatatcgcccgttcttaaccccattcgcaagcggccgctgataacaagaaaaagctcgtcctcatgctcatgatgatgccagtcaaactttccggctaacttagccagtttgacatactcgttattaatttcgccgacaattttggggctccagcattcgctgaacagagcaaaactttcttttaaattaactttatgcactcatcttctccgtcatatatataatccagatggatttatttggcatagtaaaagaaccgacaatggtagcgcggtgcgctaccggaagatcgatattcattgctaaaaaaactccggcagaccaaagataaattggccgtaacatggccagctttctggcgctaacaactgcttcgcattgcggaaaatacagcgcagggaagccggtgctgttgttcgaaataacaatacagtcagcccgcatgcagaacaatgggtttcccggttacgggcgcaataatttatcaatacaaaatcaatcggctgaatttacttcattttatttataaaagaattttccgcctggctttcaggagagcgtttttgtttctttaagtgaacacatgctcgctcttcggcattttatcagggggctcctggccagataatcgcgtagaggagttaacctggctcgaggtgagtcatcaccaccgttgcgctaatcgccgtctctcttgagctgtatgtgtgcgcaacctgcgcggagaaagcgtaaaaatccccgggttctaatgtgatgacttcgtactgactaaagcgcagatgcagggtgccgctgtgaaccagaatatgttcatgcgacccgtctgaatgcccgggactgtggatggtgacctgcggctccatttgcagcaaccatatctcggaggtattgccggggccgatgcggaatttcatcatttgtgaatattcgcccggcgcgggacgatgcttatcaaaacagggatatatcctgctgccgccgctcagtaaatcgccaaccggtaaacgtaatgcagtggcgatagcgtccaacgtatcgacacgggggctggaaaatcctgactccagtttggataatgccccctttgaaacccctgacaatttagacaggtcgtttaacgaaatcccccgtgactgccgcagtcgtcttattttattgccgatatttaatgacaacgcagcaggtttatcgtgtcctgaatcagccattattgcgaccctccccgagtgtggctttctcatatgaataaatgcccgcccagttgtgatcgcggtaaggacatgacgatgctgtcgccggcctgatatagcatagctgcatcaacaggcagcaatttatcacgcgcccgcaatgcctggatactctatttatccattcagatgaccccccctggggtttacagactcatgaggggccgcctgaaaaaagggaaatattgcacatcaagtaaaattttagcgctcagaatttgatgggctgctttgaacgatgagccggtcttcaatgatttgtatcagactctctgacgagagttccattggtcgcgagtggtttcccggatagcggtgtttgtcctgggatttgagtattggcggcatcttccacgatagttttacattccggccatgtaagcggccggaagtatcgtttaaacccgttcagaatacgcttttagcatggcaaggagcgcccgtcgtgccgcatcgtccgcgatattttcaggcagcgcatcagcgcggagattgatataagcgtcaaccgccttgctgatggcgatgctgacggagtcacgatcgtgcgtggccagcgtggaggtcagcaggccctcaggatcgatattgtggcattcaatgcggcgaaccccacgctgcggtagattggcgcggcggtacagcatcggtcccagcacttgctcccggaagaatgacagcatacccatcgcttcgaaaagttcgccccttcccagtttaaccaccgcataatgaagccagatccaggctcgggactcaaaccactccggcgtcatgtcaggccactgggcacgaaattgtgccagatgtcgctccagggcatggcgatcgcgagaaaataacactaccggctcctcaacgcgttgagtgagcatgtccagggtgacaaatttcagatcgacatggaggagttcagggccatacaggcatatcagcaggcgaggctctccgacatgttccccggtgaacgcatgcagcaggttgcctgcagttccggcgaacgccacacgctgcgccatgatttcatcatagtaaagagggtctactacaacgacaaaatccaaatcggagtatttatcaaatccgccatgaataagcgagccgcccgcgagcagggagtgaatccgggcgtcagactgaacgttaagcttgagttgctctgcaaaacttctgtgtaaatcgggtaacgtactaagcatactttttcctgttcacaaaaaatacaaagcattacagaatatcgagttcggtatattcgggccagatatttttgcaggaagcgtcgtttcctcattgagtctcgggtccactatgggtggatagcctgagccacgtagcccgatcctccgctacgcccgccgtcagggctttcaggcaggatggaaacgctggcggatagtcccgccaccagttcaatcccttccggtatcttatctaactgaatacgaacggggactcgctgcgcaagtcgcacccagctgaaggtgggattgacatccggcagccccagcccgccggtctcgtcattgctatcatcgatcccccggccgatactctccacgtgcccggtgatgagcgggtcaaaccccatcagagaaatgtgtgcggcgctcccgacgcgaatatgacgcagcttagtctcttcaaaatagcccaccacccagaaactgtgcgcatcgaccacggcgacctttgtttctcccgccgcggcgtagtcgccggggcggagccgaagatgcgtcacgtagccggtaacgggggcgcgcaccgttgcatgggataagttcagctgcgccagttccagcgcagccagcgccccctgataattggccgccgcgacgcgcgctgcgctgcctgtttgctggatatcctcgccggaaatgacccctttgatgagcgcgcgtcgccgggcggcatcctggcgcatcagcatttcatgacgttttgcttcgacgtcggcctgcgcgctgagcaccgccagcttcagccagcgcgggtcgatggcataaagcacatcgccgcggttaacccactgattatcccgcaccgccacgctgctcaccggcccggaaacatccggcgcaatctgcaccacatctgcccgaacccggccatcgcgcgtccagggcgtctgcgcatactgtttccagaaaataaacgccacgcaggccgctaccgctactgcgattaacgtcagcgcgtaacggcccagcaaagagaaaaaagatttcatgcgaataaccccagtgtggtcaggccctgcaaaagcaggaaaaaggtcacgatataggttgaaacatcaagcagcgggcgtaagggcaagcggcggtaaagcctgctgcaggagaaaagcggtacgagtaacagcgtacagaccagggcaatgagcgcggtcagcagcagtccggggataaaaacgcccccgatattgatgtcatttatcatgggtgggttcctcgttctgcgtccgtaacgcgcagtgcagatcgaccagtcggtcgacaaactggcatgatttttcctccctcgcgggcaagcagcggttcgccatggcggcaatgcgctcgcgtaaggcttcggtctccgttgtgtgggtaagacgagaaagcacctcgtggatatcgctgccggcgggcgtttcgcaacggcgcaggcgcataacgcagaggcctatgcgcagaaagtgcaccaggcgatcgagcgcccgggcggaggactgcccgctgcgcggcaagcgtggcagcagcagggcggcccggtcgatcatcagattggtccagtgcgtttcatcgcctttaaatacgccgctcacgctgcggcgaatatcgcgttggcacagtttcagcagacgctttatcgccgcgtccgcctgtacggtttgcagcagactcatgccgataaccgcaaagccggtcgcgaaaaacagggcgatcgcggtgttggccgcgtcggcgaagtcgccgctgtagcgcgcgcccagctcgcacagtaccggcagcgtcagggtgatccccatggccataaaggtcgtggggggccgcgcctgcagcgagccggcaagcagatagaccggggcaagcaccgccaccagcacggggaaatcgctgagcggaggaagcagggcgaagctatagataaggcttatcactacgccccagacagagccgataatatatttcacaatatgcggggccggcgtgtcgaaactgccaaacagcgtgcagcaaaccccgagaatcgacaccgccgtgccgccatcgggccaggcagagtaaatccatagcagacagccgctcagaatgatgacaaaagcgcccagcgccgtgcgggcggcgctcaggggatcgcgatggaaaacgtatcctgtcgccgcacgatcttccacctgcgctggcgcaggtctggcgtgatgaatggcctccgaaagccgctcacactgctgcaggagggtaatcaactcagcgatgtagcgtaagaaatttacccgcagcgcatcttcaaaggtcagcgcctgcgccgcgagccgctgcgctaactgcgcgctgcgctgttgcagcgcttctgcggcgtttttgcgttggccggtatcgtcgcaggtcagccaggcctgcacgtcattcagtagagtctgcatcgcggcgggcatcccggcgatggtctgcaaacgatcgcgtacttcgccgttgacaatcaccaaccgcgccagcctgtcatggagcgctttcctggcctggcgggccggaaccgaaagggcaaaatcatacgggatatggtggctgatgccctgcagaaactgtagcgccagcgccagatgcagcggctctgactgcgcgtcggccttgcctgccagggtgtcggcaatccgctggcgcgcggcgtgcagcgtctgggctaatttgctgttgaacagccctgatatccgggcaggtaaaatgtagcggtgaatcagcgcggcgcagacgataccgatagcgatttcctgtacccggatgagggcgatgttaaacaccgtgccgggatcggcgacggcgggaaaaccaatcaggcttgcggtataaccggccagcacaaaggcataggcgcggggcgtgcgttcaagcagggataaatagaggcagaaggtgatccagcctgccagaatcacgctacagagaattggcgtattcacaaacgtcggcacaatcaataccgtggcccccgcgccggccacggtaccggccaggcgataaaggcttctgctcagggacgcgcccaccgaggtttgcgacacgatgtagacggtgatgatggcccatgagggccgttcaaggccaatcgccagggcaacgtaataggcgagcatcgcggcggcaaaactcctgacggaatagagcagggcatgggcgtcgctcagcagcgagggagaggctatgcggcctgaccaacggcttatcgcgtgtaaaaaacggctgtgatgggaagttaatgtgctcatgccgggaattattcccgctttgcgcgtctccttaaatactctattctgtcaaaaaatacctaaatgttgccaatgagatgccatccagacttgcccataccctgtttgatcccgatagcacgccgagccctgccgtcgcgcggcatattgatttcgttgattacgcggcagaagtgccggttcatacccaccgcaagggacaactgatcgttgccctctatggggcggtgatttgtcgtgcggaaaacgatatctggatagtgccgccagactgcgcggtgtggatccccggcgggatcccgcacagcgccaaagcgacctggaatgcgcatctcaactatttgtttattgaacccggcgccgccgcgctgccggataaatgctgcacgctggcgatttcgccgctgattaaagcgttagttgaccgcttaacgaatgcggacgtcgattacgccgcggagagccatgtcggcaggctgaccagagtgacgctcgatgagctggccaccatgccgcagcagaaactgagcctgccggtttcggcgcatcctaagatccgcgccatggcggatgcgctggtcagccacccggaggatcgcagcacctttaaagtttgggcgaaacggctggcgctcagcgagcgctcattagcgcgcctgatgctgcgcgaaaccggcctgaccttcgggcgatggcgtcagcagctgcatttgattattgccctgcgggagctggcaagcggggtatcggtgcaaaacgtggcggctaatctggggtatgagtcggtcaacgcgtttatcaccatgttcagaaaaacgatggggagcacgcccgcgcactactttgccggtcgaagaacggcagatccctgagcggcgcgcaggctggatgcggagtgaggcgcttaatatccgccgcggccacagcgtcgcggcgagcgcaaaatttagtcagagaagggcggggtcggctggcttaatccagtcgtatccgggttgccgatgctgcggcgccatgcgccgggggcctggccgaactgacgcttgaagctgcggttgaaggactgctgggagtcaaagcccagggcgatcgccacgttcaaaatcggttcgtcgctgtgggctaagcgctcgaccgatttttgtagcttttgcgcgcgaatatactcggcgagaggataaccggtatgctccttaaatagccgctgcagatgccatttcgaatagccggctcgcctggcgacggtgccaatgtccagacggctatcaagattgttgtcgatccagtcgagtaaatcgtgaatgaatgcgccagtgttcatctgatgtacctctacgcagcgtctaaaaaagcatctttatctgttgcatttaaaggtggcccgtttttgcactaattgcaagttttattgttgcatttaaatccatgtcggaaacgcgccatttttaggcgccaggaatagcacataaagtgcaacaattattcttgcactaaatttagcgccttcctacaatcgccgcgatagtgtattcgcaactgttacagttttgtggcgatgaacgacacaaatggccttaagccagcccggacaaaggaagtggcgcggtgtcttccgctgcgtcttgcccggcggctaccaataccggaataaaaataatgagcctgcaaaaatactggggtaactttcatctgactgtgccgggcgtgatgctgctctcggcgctcctcgttggatgcgatgagggcgtcgcgcaaaacgccgcgccgcaggcgcccgccgtcagcgccgctgatgtggtcgtcaaatccattagtcagtgggacagctttaacggtcggattgaagcggtggaaagcgtccagctgcgaccccgcgtctccggctacattgacaaagtgaattacaccgacggccaggaggtgaaaaagggggaggtgctgttcactatcgatgacagaacctatcgcgccgcgctggaacaggcgcaggcgacgctggcgcgagccaaaacgcaggccagcctggcgcgaagcgaggctaaccgtaccgataaattagtcaataccaacctggtctcccgcgaagagtgggagcagcgccgcgccgcggccactcaggcgcaggccgacattcgcgccgcgcaggcggcagtcgacgccgcgcagcttaacctggacttcaccaaagtgaccgcgcctatcgatggccgcgccagccgggcattgatcaccagcggtaacctcgtcaccgccggcgacagcgccagcgtgctcaccacgctggtgtcgcagaagacggtttacgtctactttgacgtggacgagtcgacctacctccattatcaaaatctcgcccgcagcgggcagggcgcgtccagcaatcacctggcgctgccggtggagattggcctggttggcgaagagggctacccccatcagggcaaagtggattttctggataatcagttaacgccgagcaccggcaccatccggatgcgcgcgctgctggataacgcgcagcgtcagttcacgccgggtctctttgcccgcgtccgcctgcctggcagcgcggaattcaacgccacgcttatcgatgataaagcggtgttgaccgatcaggatcgcaaatatgtttatgtcgttgataaagagggtaaagcgcagcgccgtgatattacgccgggccgtctggccgacggtttgcgcatcgtgcagcaggggctgaagccgggcgacagagtcattgtcgatggtctacagaaagtgtttatgccgggcatgccggttaacgcgaaaaccgtggccatgaccgccagcaccgccctccactgatcccttgacctgagaatccaacccatggacttttcccgttttttcatcgacaggccgatttttgccgccgttctgtcgattctgatttttatcaccggattaatcgccatcccgctgctgccggtgagcgaatatcctgacgtcgtaccgcccagcgtgcaggtgcgcgcggagtatccgggcgccaacccgaaagtgattgccgagaccgtggcgacgccgctggaagaggcgatcaacggcgttgaaaatatgatgtacatgaaatccgtcgccggttctgacggcgtactggtgaccaccgtaaccttccgtccgggtaccgatcccgatcaggcgcaggttcaggtgcaaaaccgggtatcgcaggccgaagcgcgtctgccggaagatgtgcggcgtttagggatcaccacccagaagcagtcgccgacgctgacgctggtggtgcatctgttttcgcccggcggtaaatacgattccctgtatatgcgtaactacgccacgctgaaggtgaaggatgaactggcgcgcctgcccggcgtcggccaaattcagatcttcggctcgggcgaatacgcgatgcgcgtctggctcgatcccaacaaggtggcggcgcgcgggctgaccgcgtcggatgtggtcacggcgatgcaggagcagaacgtccaggtttccgccgggcagcttggcgccgagccgctgccgaaagagagcgacttcctgatctccattaacgcccaggggcgcctgcataccgaagaagagtttggcaatattgtcctgaaaacaacgcaggacggtacggtcgtccgcctgcgcgacgtggcgcgtatcgaaatgggctccggcagctatgcgctgcgttcccagctgaacaataaagacgcggtcggaattggtatcttccagtcgccgggggcgaacgccatcgatttgtctaacgcggtgcgcgccaaaatggacgagctgtcgaagcgtttcccgcaggatatgaaatgggcggcgccttacgatccgacggtatttgttcgcgattccattcgcgcggtagtgcaaacgctgctggaagcggtggtgctggttgtgctggtggtgatcctgttcctgcaaacctggcgcgcgtcgattattccgctgatcgcggtgccggtttcggttgtgggtaccttcagcattctctacctgctgggcttctcgctgaataccctgagcttgttcgggctggtgctggccatcggcatcgtggtggatgatgccatcgtagtggtggaaaacgtcgagcgaaatattgaggaagggctggctccgctcgccgcggcgcatcaggcgatgcgtgaagtgtccggcccgattatcgccattgcgctggtgctgtgcgcggtgtttgtgccgatggcgtttctctcgggcgtgaccggccagttctacaagcagtttgcggtgacgatcgccatctccacggtgatctccgccatcaactcgctgacgctctctccggcgctggccgcgctgctgctaaaaccgcacggcgcgccgaaagacttcccgacccggcttatcgaccgtcttttcggctggatttttcgtccgtttaaccgctttttccaccgcagctcgaacggctatcaggggctggtgggaaaaacgctcggacgacgcggggcggtgtttgtggtctatgtgctgctgctctgcgcggcgggcgtcatgtttaaagcggtacccggcggatttataccgacgcaggataaactgtatttaatcggcggcgtgaaaatgccggaaggttcttcgctggcgcgcaccgatgcggtgatccgtaaaatgagcgaaatcgggatgaataccgaaggtgtggattacgcggtcgcgtttccggggcttaacgcgctgcagttcaccaatacgccgaataccggaacggtcttctttggcctgaagccgttcgaccagcgtaaacattcggcggcggaaattaacgctgagatcaacgcgaaaatcgcgcaaatccagcagggctttggcttctctattttgcctccgccgattttagggctcggccagggttccggctattcgctctatattcaggaccgggcaggtcttggctatggtgcgctgcaaagcgcggtaaacgcgatgtccggtaccattatgcagacgccggggatgcacttcccgatctccacctaccaggctaacgtgccgcagctggatgtccaggtcgatcgtgataaggcgaaagcgcagggcgtgtcgctcaccgatctgtttggtacgctgcaaacctatctgggatcgtcttacgtcaatgattttaaccagttcggccggacctggcgcgtgatggcgcaggccgacggcccgttccgcgaaagcgtggaggatattgccaatttgcgcacgcggaataatcagggcgaaatggtgccaatcggcagtatggtgaatatcagcaccacctacgggccggacccggtgattcgctacaatggctatccggcggcggatttgattggcgatgccgatccgcgcgtactctcttcctcgcaggcgatgacgcagctggagaaaatgtccggccagatattgccgaacgggatgaatatcgaatggacggatctgagcttccagcaggccacgcagggcaatacggcgctgatcgtcttcccggtggcggtgctgctggcgttcctggtgctggcggcgctgtatgaaagctggacgctgccgctggcggtgattcttatcgtgccgatgacgatgctctccgcgctgtttggcgtctggctgaccggcggcgataacaacgtgttcgtacaggtggggctggtggtgctgatggggctggcctgtaaaaacgcgattctgatcgtggagtttgcccgcgagctggaaattcaggggaaagggatcatggaagcggcgctggaggcgtgtcgcttgcgtttacgtccaattgtgatgacctctatcgcctttattgccgggaccatcccgctgatcctcggccacggcgcgggcgcggaagtgcgcggcgttaccgggatcacggtgttctccgggatgctgggggtgacgctgtttggtctgttcctgaccccggtgttttacgtgacgctgcgtaaattcgtgacgcgcggtaaacctgctgaggacgtttcgccggcgtagggtgcggcagataacaaaaaaccgccttcactgtgaaggcggttttttttgcgctcaaggaaaattaatgggcttctttatatttggcgataagttcaggcaccggatcgcacccgctggtatcggcttttttcacctcttccagcgcgcttgccacggtgtggcgtgccagtacctgtagcgaagcctgctccgcttcatcggcgatagatttgaagtaccagcacgcgttcgcgctgaccacgcagcgggcggggacgtcagggcgcgacgcccacagttttttatcttcgataacggagacgtagatatcgcgcagggtgatctcttccgccgggcggccgagatgaatagagccgttgcggccaagcgttgagacaattatgccgtcacgcgtgagaggaaccatgagtttgcggataaagctcgggttcgcttccaggccgtaggccagaatcgcgctcgtcgaacgttcacccaactgctccgccattgctacgctgagaaccatctgcaaagctgtcgggaagcggtaatctaacattttcttatcctgggtagcggtgaatcttgttctttttggcaccgcagaggtgagtaagcaataaacaacaatataccaaatacggtaatttttttgaagcaatctgcgcttttcccaccaggtaaaaaagcgtaagtgagagcggggccagccgacgcttcacgccatggcgtgaggcactgatgaaaaaggtatcagcatttaatacccgctcgggcacacaggacccccggggtcttaatgggcgtttaccgttgaagttgaatgaggtgggtagccatcccccatctgagtgcggcgcatttgccgtccgtaaaatcgaaaacagagtaactcgcattggggtgagcatagcgagagaagttatcgagagccccctctttaagtatcgccagcacgccctgactgacatgcccgtgagaaacaacacagacgatctgatgtgcactggtattttgcaggtgttgtaagaaatttatcacgcgtcgagtcgcctgggctaacgactctccctccgggggacaataggctgcatcaaggaagagcaacgcatcggcatcacgcggattgtttcgcctgaagtgctcgaaagatatcccttcaaagcaaccaaacgactgttccttaagagattcttcaacttttaacgggcagccaagaccttcagacagcttcagccccatgtgcaaggcgcgcccaagcggggagctgtaaacacattctattggatatgcctctttcgtcagcgctgtcagtaacgccgctgtttcttgcataccgcggtgggttacgaagctgtcgcgatgcccctgaataatccctctatgattccactcggtttctgcgtgcctcacccatatcactttcatcgtatttgagatccgttatccaatgtgaatacccgtttgtttatctgattcagggcgaaagtgtagcatggtgaacgtttgaagccggtttctggatattatccagcgataatgtccgcttcacgccctgagacattcgacaagctttctacggcattagtaagggcgattttcgcgcttccagtgccagcaaatatttcgcttcgtcataacgggttctggtcttccagcagcggtaaataatccttatccatttgaatgccagagctcggatcgctgattgatgagattttcctttttctcgcagcccctgataatacagcttggcccagtatgatgagttaaccgtcttggcagcccattcgacaaaggtttgcctgacgaacttggcacactgccatcgccagtgaacccaggatttctggccactccgttcagtcaccggagcaatacctgcgtagttttgaatttcctcagcgctgttgaagcggtcgcggttatcacccagtgcggcaagcatacgtgggcccatacacggccccatgcccggtagtgatttgaacagctctgcatccggaagcgtatcgaataacgattcgattcgttcgtcgtaggttctgataagttcacctacaagtttgatttgtgatgcaagagctgttgccattagcgcgttcgcctcgatgacacttttatcagtggtcaggggaatcgcgttggcaatgcttgtaacccgctgttctgtatacgcaacagcgggaccacctcttgcgttcataaaatgacggacggtattactccgggcacgtttgagctgttgtaggcttggccagcggattatgagctcacagaacaatgaactgtcccgatgcgagaaccattccaggggttgaggataatactgcttaagcgtgttaatgagccgattaacaaagcggcgtttgtcttctaccagcagcctacgctgctcgactagttgtagaagtaaacggatatcagcattgtcgggttcgatggctttaatcttttgggggtagcgtagcatcagatctaacgccaactcggcatcctgaggatcatccttcgcgccacttggccagaaggtctgccgatagcgggccaatgataacgcgtgtacaggaaagacagtaataaaggggtacttctggagagcatatactaccgggcctttcttcagttcaagggcgatagcgatcctgcctttgaccttctggtgcaactcattgagccaggtatcaagcgcttccggcgtatggttaatcacatggaatgtgcgctcaccgtttttaaactgaacgcagacatcgtgctttttatccgcccaatccagaccaacatgagcagcaaactgatctatagcagtcatcaccaactccttttaaacggggattggtatgcattccacgcccttcgaaagaaatatagtcagcagtttatctgcatgccctgagtattcgttagcgaacgtggagcacttactggctcgaaagcaaagcggcaatcatcagatcacatgattctggcacaatattcgtaaccagtaagcgcataccctgaatcacttaaaagtgtaaccctcagggttcgaatgactatatctggcacaaagcgctgcctaccaaactcaccccatgtcctgtcgcggtgtattaaacaacggggagccactcagcttaagcatgtacgtttgctttatactaagatatttatccaacataggcgttaagatatcgtctcaggatcaagatggatttatcagcatgaccagaacagaaaggcttctcgaattactacagatattaagggcgcaaagatatccgatcacggcttcagctctctcagaaagattagaaataagcgtgcgctccctttacagagatataaaaacgctacagcagcaaggtgtgtgcattgaagggggggctggaattggttatatcgttaagtctgactttcatttgccgcctttaaatctttctcatgaagaaattaatgctattatacttgggctaaactgggtttctcataatacggatcatgatttcaaaaaaaacgcaaggaatgcgcttgctaaaatacatgccgttattcccggtgaattaaaaaatcttattgagagtcaatcctatctgaccggtcccacagaaaagaatgaggtgttttttgaagacttgcgtgatgcgattaaaaaacgaaagagaatcaaaataaagtattgtgataagagcaatgttaactcttctcgagtcatatggcccatcgcattggtatatatggagtcatgctggcttttggttgcatggtgtgaaatgagaaaggatttccgtcattttagaacggacaaaatacaaggcattgtgccgctggattccaggtatagtgaaagcaggttagttttattgaataaatggagaatgaaagaggggatcggcctggagaaagagtactgacaaaaactgtcactgcgaatttgtatacttcctcagatgtaagactcaatgctacgtcataggggggattgtgaattttcaaaataaagtggctgttatcaccggcagcactgcaggtataggcgaggcagtcgcagagcaattacacaaacatggcgcgaaggtcgtcattgtgtcccgctcgtcagaggaggcgaaacaaaaagcgaaacaattgtcttcacagggacaaccagcaatggggatcggatgcgatgtgtcacagcccgaacaagtacggcaaatgatagatgacgttatcaactattttggcaggcttgattatgctgtcaataatgcaggcataacaggtgagcatggtaaaaagataacagagcagacagttgaaaactgggataaggtcattgccacctcattgagcagcgttttttactgcctaaaatacgagatacttcagatgatgaagatggggggcgctatcgttaatttatctgcagtaaatggtctggttggcattcctgggctggcgccttacaccgccgctaagcatggtataattggtttaacccaaaccgcagcgctggagtttgcatgtcaaggcattcgcatcaatgccgtcgctccgggctatgtccaaaccccacgaataagcgaattccctgaaaatatcgtacgcagtttcgcaaatagccaccctatgaaaaggatggcaaaaatgcaggaaatcgcagacttcatattgtttttgttgtcagataaatcagcgttctgtaccggaggcgtttatcccattgatggtggttttttagctgagtgacattcccgttaggttttttaaagcctccgttttgccgcgtcagaggccaggggcatgccgggccgttccgtcaacgtcagcccggcgctggctatcactgatatttggcgaccagatactcctcttcgctgcgtcgccagaaatgtgaaggaataaacggggatatatactcatacgagggcgcgaagaaggatcgtacctgagcccggcgataaaaaacgtattgcacatatccgggagccgctggagcggggaacgcccctgaaaaaaagcggcgggccggtgatatttgctgcacgcttttccctcactatctgctacgggacagcataccgcgtcgtatgctgccttgccgttcttttcgttaacccggagttcactatgaacacgttgtcgtttttacattccgccattaatcaacgtctgctgctgccagtggtgtttgctctgctgaccacgccggttttggccgcaggtgacaatagtaccaatagcaaaacgccggactgccccagcggtcaggtgtatgacagcacgaaaaaacagtgcgtacctgaaaaaacaagccagctcagcgatgaagataaaacgcgttatgcctatcatctggccaaaaaaggggagtaccaggcggccctggacctgctcaacaccctgaaaaatggcgataccgcggaagcctggaattaccggggctatgccacgcgtaagctgggccgtaccgatgagggcattggctactatcagcgttcaatcgcgctcgatccgacctatgccaaagtacgtgaataccttggtgaagcatggctggcgaaaggccgtcctgacctggcaaaagagcaattgaaaactatcgccacgctgtgcggctatagctgcgaggagtaccgggatcttcaggcagcgatcgacggtcatcctgagtcctgaataagagtatgaggataaaaaaattacgaccagcggcgtccgtcagcatcttgctgcacatctgacacgcctgtggcgctatgggttggttctgtcgcgtaaccgagaggttgtcgaagagcgggttcagtctgcctgtgtccgcgcgcttgaaaaaagcgcgcggttcaccccgaggaggcggccgacacgttgcccgtcccgattggttaccctatcctggttttatctccaattgaccggccccgggcaatagccgctgtcaatgttccctggccaattcgtggcatacgataccgagctgttctacggcatgcaaaagcgcgggggtgggttcattcgcaccgttcaggcgcaggtagttttgcagttccgccgcgcccggggaaaacagcggccccggactgacgccaatgcccagggcgagtgcgcgacgatgtacctccagcgcatctatcctggaggggagttgtacccaaatcaaaaagccggcttccggagccgcgacgcgcgtgcccggtgggaagcaggcttcaactcgggtgatgatggcgcgcataccttccgcaatccgcagcttcaggtgccgcaggtgcctgtcgtaatcgccgctggcgaggatctcgtttgccgcggcttcaatcagcggcgcgcctgcccattctccggccatgcgggcctgcaataccgcggagtggtagcgtccggcagcaatccagccaattcgccagcccggcgccagggttttcgacagcgaactgcaataaatcacatttccgtccctgtcgaaggctttacacgcgggcggacgctgagcgccaccggccagatcgccatacacatcgtcctcaatgagcgggatgcccttatcggcgagcagcgccaccagcgcctgtttgcgcgccacgggcatgctggcacccagcggattttgcaccgtgggtgaggcaagcacggccgcagggcggtggcgctggatagcctcttcaaggggcgccaacaataagccttcaatcgggtctgtggggatctgtaacgccttcagacccagatcttccagcagcagaagcgtgccgaagtaggcgggctgctctatcgcgacagcatcgccaggctggcataccgcgcggagcgccagacgtagcgcctgggttgcgcctgccgtaatgataaggtcatccgcgccaaaaagagcgccccactgcgcagcgcgtgcggcaatctttctgcgcaggtccgctcttcccgggggcaggctgtagctctgcccgcgcgcatcaagccgacgaccggcggtgtgcagcgcccgctgtagtgcatccacgggaagccaggcgggatcgggtagcgcggcgccaagcggcaccagacgcgcttcagcgctaccgaacagcgaccgggcaatggcggacatagtcaccggcaccggcccgggcaaagaggcagcgcgctgttcgtttccggaggcggctggctggcggacaaaatagcctgaacgcggtcgcgcgataatcagaccctccgcctcaagataacgcagtgcttccagggccgtggggaggctgacctgttcgcgttcggccagtttacgcgcggagataatgcgatcgccagcccgtaaaacgcctgaagcaagcgtcagccgcagcatatcggctatacggcggtagcggggcgtcggcggggatatttcggacatcgtcatctgtatagtctgctttttgataaatctgactatacaggcgaagcggggcgccatctatagtgtgttccacaccaaccagccggggaaatcatatgcacagcgacagttttgacctttcactttacttccgccgcataggctatagcgggcctgcggcagcggataccgcaacgctacacgcgctcatgcgtcaccagctctttgccatccccttcgaaaatctggacgtacaggcaggtaaaatcgtgtcgatggagcccgatgatattgccaacaagctcttacggcagagacggggcggctactgttatgaactcaacgggctgtttaccatggcgctggaagcgctgggcattgcctggcggtttgtcgcggcgcggcccatgttctatcccgcgcgccggcctaaaacccatatggcggtcgtcgcggaagtcgagggccgtcagtggctttgcgaccttggctttgggagctacggtattcgcgcgccgctggccctggatgaacttgatacggacattatccaggatttcgatacgttccggcttagccgcgatgcgcacggcgactatctgctgcaggcaaaagttgagggaagctgggccaatcaatatggttttgacctgtcacctcaggaatggattgattttgctccggccaatttccttaactccacgcaccccgacgcggtctttgtacaaaagctgctggttatacagcatcagcccgaggggcgctttattctgctgggcaatacgctcaagagcattaccgcggatcgggtagaaaagcagcggctggaagacgatgaaattgcgcatgtacttgagcagcgctttgcgttgtctgcccgctaattaatcaaaggggccaatgagtccggggcggaacgggcacgaagcagggatgccgggggagccatcgcgatcgccatgaggtgggagtgaccgcttccccgtgcccctctcaatctgttcatctgctgcgacatcagcagcgggtgattatttacgttgccggcgggtatatgaaatagcagataatgcaaataaaaaactaacgccacttttaataaacaaggctattcagttaattaccactacaaaaataagataattctatctgagctggccaatctgtatccgtagtacatatttccgccacacaaccccctgcgcctggaaattcattgctaacaagtagttacagctgcgcggcaatatttttggcgataaaaaatggttaaaataaaatcatctactaaaatcaaattgttgattaaattcatacaatgctcgttcgtattaatttagataattggctttgtgtcgaatgcccaaaatttaagcagcgggtgatagctgctgacgataattatcccgctcgatattgccctgggtctggcaggtaaattcctgctctggacgtttgtgtaaaacgacaccgggctaattgagttatttcaaaggacaacgtaaatgacgaatatctacgactctaccaatataagcagtcaggaagcagccaggcacttgcctgcggctgctgtaaacagcgcgagcgcggtttcatggggggcgatatttgcaggcgccgccgctgccgcctcgctggcgcttatgctgctcatgcttggcgccggattaggcctcacttcaatctctccctgggaaaaccaaggtcttgcggcgggtaccgtcggtattgccgccatcgcctggctgacgtttacccaaattgtggcgtcaggaatggggggatatctggccggacggcttcggactaaatgggttgatacgcataccaatgaaatctatttccgcgatacggcgcatggctttctgacatgggcggtggcgctgctggtatcagccgttcttttaaccaccaccatcagttcactcatcggcggcagcgcaaaagtcattggttccgttgccgggggcgcgacggcaaccgccgtgaataacgcgggggagggatcatcgatgttatcgaagtcatcgatggaatattttacccgctcgctgttcagggctagcggctccactccggcaggtaacagcaacgcatcaggcaatgatgttatggccatgaatcagccggcgccgccaaaggcggagtcacccgctcaattagccgaggtgacgggcatttttgctaacagtatttattctggcgcgcttcccaaggatgatctgacctatgtggcgcagttggtttctcagaataccggcatcagtcagcaagaggccgagcagcgggtgcaggcggtttatgataaagcccaggctaatttgaaagaggcaaaagataaagcgcagcaggccgcagacgccgccagaaaaaccaccagctacgtcactctgtggtcatttatttctctgttaattggcgcttttgttgccagtctctgtgccacctatggcggccgtcagcgtgatttataacgtctaatactcattatacgggaggaacctatgcgttcaatattgcttttctttctgggtgtgccaattcctatcattattttaatcgcgctatttgtgcactgactattttccggccccgcaggaatcgtggttaagaaaatactgaccctcgcacattaccgctaaagcataaatgcccgtcgagggcatttatgctttttatcaggcgctcagaggagcctgctgcgcgtcaccagggaagctctccgcgacagagtgatgtcaactagcaataacacccgcagtgaattaacgctcacgccttgccatcatcagcgccaggtcaacgaggcggttagagaagccccattcattgtcgtaccacgccagaattttaaccatattgccgccaatcaccagcgttgacagaccgtcgataatcgacgagcgcgggtcaccctggtagtcgctggagacgagcggttcatcgctatagccgaggatcccttttagcggccccgccgcggcggcttcacgaaaggcattgttcacctcttcggccgtcacctctcgcgccagcgtcacggtcaggtcgacaatagacaccaccggtaccgggacgcgcagcgagtatcccgttaagcggccatccagctcaggaataactttgcccagcgccttcgctgcgccgctggagtaaggcactatcgacagagcggcggcgcgagcgccgcgcagatctttttccggctgatcgtgcagggcctggctgttggtgtaggcgtgggtggtgttcatcaaaccgtgcttaataccgaaatgctggtgcagaacctgcgcggcaggcgccagaccgttggtggtgcagctaccgttgctgaccacgaagtgtttatccggggagtagaggccatcgttaacgcccatcacgatggttaaatcatcgtttttgccgggggcggagataatcacgcgctttgcgccaccgctgtagatatgcaccgccgccttgtcgcgatcggtgaagaacccggtggcttcaatgacgatatcgacttcatgctgatgccacgggatattggccgggtcgcgttcgctgaatacggttatgggtttaccgtcaaccacaagctgcccttcaccggcggtgacgtcggcgtcgagcttaccgagcagcgagtcgtatttcagcagatgcgccagcgttttgctgtccgtcaaatcgttgatcgccacaatctgaatatccggatgacccagtgcagcgcgtagtacgttgcgtccgatacggccaaaaccgttaataccgacctttaccatgattaactccttatccattgtctctggcgtcagagtaggccgggcaggctttggcgtaaatgacaaaaaaggatcactttacgccattttgcgacagtgaaatcgctggcgatattccccgggtgtgaggtgaagctgtttttcaaacagccgtcgcaggttaatgctgctgccaaatcccgtttgttcggcgatacgatccagggtctcgttagtttgctccagacgctgccgcgcggcggccagacgggcttcggcgacgtagcgcgccggcgaagcaccggtttcccgggtaaatacgcgggtgaaattccttggactcatggcgaccctttccgccagtttatccacgctgagatcggcggtgaggtttgcgagcaaccacgccagcagatcgttaatagggcccagggtgctggtctgctgaaggttgtagcggctaaactgcagctggccgccgggacgacgcaggtacatgacgaaatcctgggcaatatcgcgcgccaggctgaagccgtagtcctcttcaaccagcgccagggtgagatcgaagccggaactgaccccgccagaggtccagatgtgttcgtcctgaatatagagcggaccgccttcgacgcgtacctgaggaaattccgcctgcagggtatccagtagcttccagtgggtagtggctcgcctgccgtccagcagcccggtttgcgccagcagcagggctccgccgcaaatggaagcaatgcggcgggcatggggagccgcaaggcgcagccagtcaaccaccgcaaccccttcctgcgggttttgacctctgccggtaatcatgatggtatcgagcggctcgcgagggtctatctcatgcaggcgatgatcggccagcagatttaaaccggactgaccatggatcacctgatgcggctgggtggtcgctagctggacctggtagcagagctccccggcgccttccgggtgcagacggttggcctgcatcagaatgtcggcaataccggcggattcaaacagcatgccgccatccgggacaataataagtatcttcttcatgtcctgaaaagtaatctttttacagaataagtcaacagaacagacgggggagggggagtttctgccaccgcagcgacgctctcgtctcgctcgctgatggtgtgacgtcgacgggatggggttgcctgctgaggtaggtctcgcacaaactggactggaaaaatagtaccgaatctccgctatgagctaatagcagacataacatccccgggatagtttgggaaaggatactcttccagcatcagtttcggttcatgctttttgggacaggatactttatgctggttactctcatttataggatacgaccatgataactgtagagaaatccgatccattttcttcagaatcccatcgcttaatcgaaatgctatcagctgaacttgccgctattacgggggatagtggcaaaagcaatttcaccgttgaagcaatgaatgatgacaaagccttgtgggtattggcaaagaatactcatggcgaagcaataggatgcggcgctattcggccgataacgcaaaatatagccgagcttaaaagaatgttttcagaccgaagcgtgccaggagttgggggagctttactcacttttctggaaacatctgcaaaagatatgggttatagcgaactcagactggaaacccgacacatcaaccatcgggcagtaaatttctacgagaaaaatggatatattcgtattgaaaattacggcccctatgtcggtaggacagaagccgtatgtttctcaaaagcattgcgctgattgtattaattggacctgctttccgctccaggcacaacgctgtctaccaaactccaccaatgcccgtttagctatagcgttaaggctgtgagcataaagacagataacgataatgcgcaggatcgtgtgttgcgctcatgcagaaccatggtcatcgcggtttctgcatcgaaacggagcagccggcatgttcgaggaggggactcctccggagaaaacgtgcggagtatacaggcaccttaaagggagcatttttccatggcgattcactgtgcctgtctctggccgatatattcctctaatccctttgccaggacatcgaaaaccaatttgcagcacagactattgcgcaggtcttcgtgcatgacgatccaggtatcaagatagaaagaaaagaaattcggcagtaacctccgcagtggaacagagccattggccaactgcacctggcatatgccaatgccggccccggcgcgaataagattcagctgagccacgtcgctgtcggtgcgcatggaaaatgcattccggcttagctgagggaatttttccagggccttacggatgaaaggcgtatcctgatcaaagccaatcagcgcatgtttcagcagatctttgctattttcaggcgtgccatgtcgtgcaagataggacgtcgatgcgtggagaccgagttcaatgcggccaacgcgacgcgcaataagctgttcctgtactggcgtcgtcatgcgtacagcaatatcggcttccctgtgcagtaaatcctgaacccggttcgacagaactaattcaatcgttatttgtgggtgagactccctgagcctggcaataagcggcggcagaacttcaacgccgataacgtcactcgcggagacgcggacgacgccatgaatggacgtgctgttatgactaaagttggaggctgtgcgcgctagcgtattcgcggtgctctccatcgcttcggcatgcaccctcagcgccagcgccgtttcagtcgccagcaagcccgtctgcgaccgcgtgaacaacacctggcccagagcggactcgagcgcagcgatatgccgtcccgccgtaggctgcgtaatcgaaagcctgcgtgatgcgccggaaagcgagccttccctgagcacagccagaaatgttcggtaccactcccatgggatagatgtattcatacaaatttgtatagctgccctataaagatatgcaattcaatttagctctgcctgtacgtacgctgtcaaggtcaaatcagcaaagaggcagacaatatggaaacccgaggcaaggtcctgatacttggcgcaaccggcggaatcggtggtgaaacggcgcgccggcttattcagaacaaatgggacgttcgtgcactaaaacgaggacttcatggcagtgaacgacgtggtgacatccagtgggtagggggtgacgctctcgacccggagcaggtcgccgctgcggcagcagactgtagcgcgatcgttcacgccgtcaatccgcccggctacagaaactggaagcatctggtgctgcctatgctgcgcaacacgattggcgcagcagaacgaaccggcgccttgatcgtgcttcccgggaccgtttacaactatggtcctgacgcttttccgctattacgggaagacgctcagcagacgccggtcaccaggaagggagctatcagggtacaaatggagaaagaactggcggcctattcgcagcgtggcggacgggtattgatcgtccgcgcgggggatttttttggtccgcgcgccggtaataactggttttctcaaggtctgattaagcccggcaagctgcctggcgtcattaccaatccagcttcgtttgcaaccggtcaccagtgggcttacttacctgatgtcgcggaaacgatagctgcgctgctggcacgacgcgaggagcttgagccctttgcacgttttcatatgcaaggtcactgggatgccgacggcagcgaaatggtcagcgcgattcaacgcactgcggcacgctatggcggcatggccaaaatacaatcatttccgtggtggttgatgtacctggcagcacctttcaacgcaaccttacgcgaacttctggagatgcggtacctgtggcgccagccggttcgcctggacaatacgaaactggtgaattttttaggtgccgagcctcacactcctcttgatgaagctgtccatgcgacattacagggcctgggctgcattgatcgtaccgagacaaggtagcggtactgccagccactcatcggctggcacaccgtgccaggacgtgtggcataacgctaaaggcgctggcagaccagccctttattctggcgacaggcggatgcgccgttaatggcaaaagcctgatggaaaaggcgggtctgcaacttgttgatatacgcgtgacggtacgcgactggattagcgcctgtaagctggtcgcggaagggatgggcgtcgccattgtgcctgaatcagccctgccagaggcgttgcgcaatctgtgcgtggtgccagtgacgcctgccatacaccgtgagtttcggctggtctgttcgtcatccggaacgtcttccggcgcaacgcaggcgctacttaacgcgctacgtaaacgaggatgagcgggcatgcggcgaaccggatcgtcagcgataagcgacaaaccggcttattgtttatatcggcgcaggctggaggcgggatgccaaaggagggctgattcggggcgtattgggcggcgcaccagctctcccccacagttcgggcaatggccttgcagctgctgagtcacgcagtcaacgcaaaaggtgcattcgaatgaacagatgtacgcgcttgttgattctggcggcagatcgttatcacagcattcacaattagggcgaagttcaagcatggtgatctcctgttattaaaggggcgtcatgagcgctcgaggggcatctgcctgtcccgtattcgaaccgctgcgcttaatctgcacgagatgagcatgatcgacaggtcgaaaaaagcaagagattgagtggcttatcagtaccaaccgcttctggcgctggtggttgggggaaaagaccgctgagcctgtgcagcgtgagaagaggacgttaatagaggaataaaaacatcgccagatttgcccgtggcggctacagttaagattatttaactggtatgaccacataggcggatatcttttatgaacctgataacaatccctgtaaatcagggggatgttctggctgccacagtatgggagagaagcgatgctaaagcgctggtgatcctccatcctgccaccgcggtatcacaggcgttttacaaggacttcgctgagtacctttacgcaatgggattcaatgttctgacctacgactatcgggggataggtcattccaggtcaggcacgctacaacactgtcatgtctctatgtccgactggatcgagcaggatgtcggctgcgttaccgcctgggcaaagctgcgtttccccaatcttctgctgatggcggtagggcacagcgttggcgggcacgctattctgctttcgacggccacccggtcgctgcatgcggcggttcttgttgcttcgcacgctggcgtcacccgcacaattaaacaaacgcaggaaaagctcagagtctggtttgtattacgtattctggcgccggttctgtgtcgtacctttggctatatgcctgccagacgcctcgggctgggggaagatttacccgcgcccgtcatgctgcaatgggggcgctggagtgccatgcccgactatttttatgacgatcgcgcctgggatgcgcgccgacgggcaagcgaagtcacgttaccccttctggtactcggttttgatgacgatccctgggctaattctgcagcgattacgcgcctgctggcgccggtggaaaacgcaaaaattgaacgccgcgagatccggcacgcggattatggtattccggccgtcggccacatgggctttttccgcacccgatgtgcggaaaaaatatggcctgaagtcggtcgctggctggagagacagtgtcaacccccgggataatgtcttcccggctatttttcttatagtcgaagagattaacaggacatggtatgccgtaaccgtcggtgctcaggtttcaaagcggcaacaggcgcatccggggaaatagttcatcgcgactcagagagatatcatgtctgttcaaaaaagggcaaagaggatgcactaagatgctggcttatatcactataggtacaaatgactttcagcgctccgtggacttttatgaggctatttttaaagttcttggctactcacgactgccagcctggacagaaagctgggcaatgtggggagatgaaaataatccacatgaggtgttcaacttctgtatttgtcctccttttgaccagcatcccgcaacggcgggaaacgggacaatgttcgcattccgtgcagacagcgctgaccttgtcaggcggtttcatgcagcaggcctccttgcgggaggggagaatgaaggcgagccaggtacacgaaccgcatacggccccgacttttatgttgcctatctgcgcgatcctgacgggcataagctggcatgcgtttgtcagcattattctcctgaagcagataagttcgtagatgaacaatagggacttcacttaacacatttaacggtttgagcattgataaagcctggcgatgaaatgcggcgtttgcggcgaactcgctcaatatcgtttacggctgccaccgtttgctcccggcccttagccgtccgggctaattaacccccgcattaaagctgccgggctgattatggtgcaggagagcggagcgacagggcattttcctgaataagctgagaacggcgatagccccagaccctggttgtatcgccgtttagcgtctaagccaccttactccttcttctcgcccagcgtcggcgtctcgtcaaagaagttccacggtttcagcagcgcgtgcgcccactcggtcggcataatcggccactcctcggcgcgagccacgtgggtggtgccggtggtgatccacaccacgtcatcatggttgtccagcgactcgtcatctttcgcgtactggccgaggccggtgtcgtgaatcgaacggttagggtacttgccttccgggaagcgctcggtgggatgatagcgggtgacccacagctgcttatccataaagctcagacgatgataaatccactcatcaggggcaaattttgccccggtggcgaccggatgcgtgccgcccgcgtaggggataatctgatacgacaccgggttacccatccggttttctttcgtgatattgctcagcagacggatggtgcccgggtcaaatttctgcgccgctttctgctcgctatcaatcgtgtactgattgatctgcatggtgctggtacgcggaccgccggcggtattcggcttcacttccgggtccatggccaccagcgtgttgttctcgccgtcaacgtcaagatcgaggcggaagttataaatatgctggtgggtggtgccgacaatattatggtcaatcagcgtgccgtagcgggtgtcctctttggcgctcgggtcatgcatggtcttcgcctgcacgcctttcaccgcttcgatgccggtcgccccggcatcaatgccgatggtgccgttttcgtggaatacccagtcaaaaatatagtcgtagttgccgacggtgctgatccagcgcaccaccagctcgcggcgctcggtactgacgtttggcttgcccatctcctgatgcttatactccggcccggcgtagcgttcgaagatggcgattgcgcgcgggatggtcgtgggcgtgccggtatagtcggcgatggtttcatccagcaggaccgcgttggacggcgcgtccttgccgcgcacgataggcgaggtcagggtgcccatgccgtagtcgccggagtccagataggctttaaaataccagcccacgtccgggtcgccgtagggcacgatcatcccgcccagcgaaccttcatacatcacctgacgtttcttgccgttatcgttatatgtcacggtggagagaatcggcccaacgcgggagttcatgcgcaggtggaaatcccagttttgccagtggatcatatcgccggtaatggtgtagtttttgccctctggctcaatgatatccagcggtttaatctttggcgcaacgcggtcgcgaccatcataggggcgggccgccatcggcaccgggatcgtcggcccctcttcgattttgatgatcttcttctgctcaaggtcgaccaccgctaccaggttttcaatcgggtgcgcccagtagttaccgtcgccaacgtcaagatagctgaccactttcagcagccgcgcgtcctgcttgaggccatctttgccgtcgaagtagccgacggttagcggggtggtaatcaccttgctcgggtcgtcgatgccgtgtttttttaacacttcggcaaattcgctgctggcgttgatgatgttctgcacgctggcgaaatcatccagcagcaccatgccgtgggcgtctttaatcggcgtccatgaaagcacctttttattctgtaaatccaccaccgcctcaataacgtgcttgccgtcgagcatgatcacgtcggcagcgcgcggggcgttgaccggcgtaccgttgagggcaaaatcccacaccgcttttttatccggctcgcgcagggagatctcggtgaatcgggtattgggtttgaaatccgccgcggctttaacgatagcgaccgctgcgctgatttccgccgctgacagcgagttcagcggatgcgggcgtttttccacctggaaggtctggtcaagaccggactgaaacacgtcgttgataaaggtgtcagaaacccacgctttgccgtctttcatcactaccggcacctgcagctccagggttttaccattgacgatggccgttttcgcccccggttttacctttacgtaagcgccgtctttaatcagggtaaacatctgcgcgtagtcatcccactgaacgtccgcgccaaaatcctgcagggttttgtccatcgggaccatatgggcttcgccgccgtgggcgaacgccgggctttgccaggcgcaagacagagcgacagccaacgccagagccgttttgcggggagaaagaatcgccattgagacctcaccttattgttgtgttgtgcagtgccgctgcgaatgtcggcttgtgtatcgttaacctaacagcggtcagcgccggggcgtttgcctgcttttgccaggttgtttgtcagttttgccagttacaaaaaatgcctccgcagaggcatgaagatggcgataaagatgggcgaatttctaatatttactccgcaaaatccccctgctggcgggccaccagggtcaggatggagtagagcgcgaccgcctgctggtgctggttaaaaatctctaccgcccactcgacgacgccggtcgctttctcctccgcgctgcgctggcgtttcaccgttttgcgtttgcaggtcaggcgtacctggatggtatcccccggcttcaccggctcgataaagcgcagattttccattccgtagttggcgatcaccgggccgaccccggcgtcaacaaatagcccggcagcggcggaaatcaggaaatagccgtgcaccacgcgctcgccgaaaatcgactccgcggcggcaatcttatccatatgagcgtaaaagtgatcgccgctcagacaggcgaagttgacgatatccgcctcggtcagggtgcggcgcggcgtcagcaggctgtcgcccggctggatctcctcgaaatatttacggaaagggtgaatgcggtcttccactacctgcgcgccgcgcacccactgctggccaatggcggcgagcatcgtcgggctgccctgaaccgcggtgcgctgcatatagtgcttcaccgcccgcaggccgcccagctcttcgccgccgccggcgcgccccgggccgccgtgtaccagctgcggcagcggggagccgtggccggttgattctgcggaagattcttcgttcagtatctgaatacgcccgtgggcgcgggcggcgccgagaataaacgcccgcgccagttcgccgctggcggtcaccagggttccggccaggctaccttcgccggcccgcgccagggtcatggcgtgctcaacgttctgatacggcatcagagtggcgacgggaccaaacgcttcaatagcgtgtaccgccggggtctcgtccggctgcgggcagtacagcagcgttggcgggaagaaggcgcctgcggcgctgaaatcggcctggccccccagcagcacgtcacatccagcggccaccagacggttgacgttatcctgcacgtcctgacgctgttcgtggttcaccagcgcgcccatcttcacgccttcctgcgccgggtcgccgaccaccactttttgcaggcgcgcaatcagcgcgtcgctcaccgctttcacctgcgcctgcggcacgataatacgccggatggcggtgcacttttgcccggccttcgccgtcatctctcgtaccacttcgcgaataaatagcgcgaactccggctgcgccggcgtgacgtcgtcaccgagtacgcagcagttcagcgaatccgcttccatggtgaaggggatggacttcgtgaccaggttgggatgcacccgcagctgctgtccggtacgggccgagccggtaaaggtgaccacgtcctggctatcgagatggtcgagcagatcgcccgcgccgccgcagatcaggctgattgccccctccggcaccagcccgctatcaacaatcattttgaccatcgcctgcgtcagctgcgcggtagcggtagccggtttgacgatggccggcataccggcaagccaggtgggcgccagcttttccagcatgccccagcaggggaagttaaaggcgttgatatgtaccgctacgccggattttgacgtgagcacgtggcgggcggcgaagcctccctgttttgacagcggaatcagctcatcttccggccacagggtatcgtccggcagctcgcggctgccgagaccggcgtaggcgaaaagggtgccaatgcccccttcgatatctacccagctatcggcgcgggtggcgccggtttcggcggagatcgcgtacagctctgccttctgctccagcaaatatctggcgagcgccttcagcatcgcgctgcgctcaataaaggtcatcgcccccagcgctttgccgccgcgctcaatcgcgaagcgtcgcgcctgcgccatatccagacccgcgctggtgacttcccatagcgcttcgccgctgatggcgtgatggatggtacgcgcgtggccccggccggtctgccacgcgccggacaagtagctggctaactgctgcatggttcatctccagatgtgttacgtgaaatatctataaatagttctttggtgaatcataaaaatcaagctcgcatttaataatttattaacattgtgatcggtgatgatctgcgttatgcacttaatatcttgttaataagggtttttacaaaagcttttgcggtcgctatcacaaaaagaacaaacaaaatttgtggttttatttaacctgaatgtaacttttataaaacaaagtgattcgaaaattatttttaatcgaatttattggaatcataaaggtgatgacgtgacagaagaacaacgctttgaccagcgcatcgcgcaggagacggccatcgaaccgcaggactggatgccggaagcctaccgcaaaacgctgatccgccagattggtcagcacgcgcactcggaaatcgtcggcatgctgccggaaggcaactggatcactcgcgcgccgacccttaggcgcaaagcgattctgctggcgaaagtacaggatgaagccgggcacggtctgtacctctacagcgcggcggaaaccctcggctgcgcccgcgaagacctgtatcagaagatgctcgacggcaagatgaagtactcctccatttttaactacccgaccctgagctgggcggatatcggcgtgattggctggctggtggacggcgcggccatcgtcaatcaggtggcgctgtgccgcacctcctacggaccctacgcccgggcaatggtcaagatctgcaaagaggagagctttcaccagcgccaggggtttgaagcctgcatggcgctggcgcagggcagcgacgcgcagcggcagatgctgcaggacgccatcaaccgtttctggtggccggcgctgatgatgttcggcccgggcgacgataactcgccaaacagcgcccgcagcatggcgtggaaaatcaagctccattcgaacgacgaactgcgccagcgctttatcgataacaccattccgcaggtggaaatcctcggcatgaccgtacccgacccggatttgcggctggatgaaaccagcggccactaccgctttggcgccatcgactggcaggaatttaacgaagtgattgccggacgcgggatctgcaaccacgaacgcctgggcgctaaacgcaaggcatgggaagagggcgcgtgggtgcgggaagccgcgctggcgcatgcgcaaaaacagcaggctcgcgacgccgcgtaaggagaatgaagatgagcaaaaactactggccgttatatgaagtgttcgttcgcagcaaacagggactgtcgcaccgccacgtcggcagcctgcacgccgccgatgaccagatggcgctggaaaacgcccgcgatgcctatacccgccgcagtgagggctgctcgatttgggtggtgaaggccagcgaaatcgttgcctcgcagcctgaagagcgcggcgcatttttcgacccggcggagagcaaagtctatcgtcatcccaccttctacaccgtgcccgacggcatggaacatatgtgaggccacgatgaaaaacgataaccccgttgccgcttatgccctgcgcctcggcgataacggcctggtgctggcccagcgtctgggcgagtggtgcggccacgcgccggagctggagatcgatctggcgctggccaatatcggcctcgacctgctggggcaggcgcgccatttcctcagctacgccgccgaactgaccggcagcggcgatgaagataccctggcctttggccgcgacgagcgccagttttgcaatttactgctggcggagcagccaaacggcaacttcgccgacaccctcgctcggcagtttttcatcgatgtctggcacgtggcgctgttcggccgcctggtcggcagtcgcgatgcgcagcttgccgccatcgccgccagggcgctgaaagaggtgcgctaccaccagcgctttagccgcggctggctggagcgtctgggcaacggcacggcgttttccgcccagagaatgcagagcgcggtggataacctgtggcgctttaccggcgagctgttccaggccgatgagctggaaattgagctgagtgcgcagggcatcgccgtcgacccgcgcgaactgcaggccgaatggcagaacgcggtgcacacggcgctgatcgacgccggtttgcagatcccgcaagaagcggctttccgcagcggcggtaagcaggggctgcacagcgaacatctcgggccgctgctggcggagatgcagtatttacagcgcgcctatcccggccagcagtggtagcaggaggggattatgcaacgtctggttgatatcgcgcccccggaggtccacgccgtctgggatctgttaggcgccattgccgatccggaagtgccggtgctgaccattaccgaccttggcctggtgcggagcgtggagcgccgcggcgatggctgggtgattggcttcacgccaacctattcgggctgcccggccaccgaacatctgctgggagaaatccgcgcggcaatgacggaaaacggctacgcgccggtgcatatcgtgctgcagcttgacccgccgtggaccaccgactggatggggccggacgcgcgtgaacgcctgcgccagtacggcatcagtccgccgcagggccatgcctgccatgcccacatgccggaggacgtggtctgcccgcgctgcggcagccgccacacctcgctgattagcgaattcggttccacggcctgcaaagcgctgtatcgctgcgacagctgccgggaaccctttgattactttaaatgtatttgaggttgcgatgacgacatttcattcgcttaccgtggcgaaagtggagccggaaacccgcgatgcggtcaccatcacctttgccattcccgacgcgctgcgtaatgcatacgccttccgtccgggccagcatctgaccctgaaagcgcgccttggcggggaagagctcaggcgctgctactccatttgccgcagccgctcgccgggtgaaatcagcgtggcggtgaaggccatcgacggcgggcgcttctcgcgctatgcccagagcgacattcagcaaggcatggcgctggacgtgatggtgccgcagggccacttcggctaccagccgcaggccgggcgttgcgctgactacctggcgattgccgccggctccggcattacgccgatgatggcgattatcgacgccaccctcgccaccgaagtcgacagccgcttcacgctggtttacggcaaccgcagcagccacagcatgatgttccgtcaggcgctggccgacctgaaagaccgctatccgcagcgtctgcaggtggtgcacctgttcagccaggagtcgatggacagcgatctgctgcaggggcgcatcaacggcgacaagctgcgcgaactggccgcccatctgctggacttcagccgcttcgagtacgcctttatctgcggcccggcggcgatgatggatgaagcggagatcgccctgcgcgagctgggcgtaccggaggacgcgattcatctggaacgttttaataccccggacagccgcgccaggcgggctaccggcgtacaggcggagggccgcgcggtcacgattcgtcaggacggccgcgaccgaaccattgccttgagcgcggaggatgacagcattcttgacgccgcgctgcgccagggggcggacctgccgtttgcctgcaaggggggcgtctgcgccacctgtaaatgcaaagtgctgcgcggcgaggtggcgatggccgctaactacagccttgaagccgacgaactggcggcgggctacgtgctgagctgtcaggcgctgcccaccagcgacgatgtggttgtcgactttgacgcgcgggggatggcatgagcgaactgttcattgctcgtcacgcgcgcgtactgcagctgacgctaaatcgcccgcaggcgcgcaacgctttgaataacgcgctgctgacgcagatcgccgacgtgctcgacgcggcggcgctggacccgtcggtcggcgtctgcgtcatcagcggtaacgaacgcttctttgccgcaggggctgacctgaacgaaatggcggaaaaagatctgcccgccacgctcgatgatattcgcccgcggctgtgggcgcgtatcgacgccttcagtaaaccgctgatcgcttcggttaacggctatgccctcggcgccggatgcgagctggcgctgctctgcgatctgatcgtcgctggcgataacgcccgcttcggcctgccggaaatcaccctcggcattatgccgggcgcgggcgggacccagcgcctgatccgctccgtcggtaaggcgctggccagccggatggtcttgagcggcgaaagcattgatgcccatcaggcgcagcgggcggggctggtatgcgaggtttatccgccagcgctcaccgatgaatatgcactcgctttggcggcaaccgtggctcgccactcgccgctggcgctgcgcgcggctaagcaggctttgcggttgtcgcaggaggtgagcctgcaggccgggcttcagcaggagcgccagctgtttactttgctgagcgcgaccgaagatcgccgcgaaggcatcgacgcctttttacataaacgtactgcggaatttaaaggacgctaatcgtggaagctttcattctcagcgaagtggaacagggcgtgatgacgattacccttaatcgcccggaccgtctgaacagttttaacgacctgatgcacctgcagctggcgacgtgcctgaaacaggccgaacgcgacgacagcgtgcgctgtttactgctgaccggcgccgggcgcggcttttgcgccgggcaggatttaaatgaccgcaacgttaaccccagcgggccggcgccggatctcggtttatcggtcgagcgtttctacaaccccctggtgcgccgtctggcggcgctgccgaaaccggtgatttgcgcggtgaacggcgtcgcggcgggcgcgggggctacgctggcgatgggatgcgatatcgtgctggcggcgcgttcagcgaagttcgtcatggcgttcagcaagcttggtctggtgccggactgcggcggcagctggtttctgccgcgcgtggcggggcgcgcgcgggcgatggggctggcgctgctgggcgatagcctgagcgcggagcaggcggcgcagtgggggatgatctggcaggtggtggacgatgccgagctgaaagacaccggcctggcgctggcccggcacctggccgcccagccgacctatggcctcgggctgattaaaaacgcgctgcggctggcggaaacccagaccctggaccagcagcttgatctggagcgcgactaccagcgcctggccggacgcagcgccgactatcgcgaaggcgtcagcgcttttctggcgaagcgtccacctcacttcagcgggaaatagccgatgagcacaacgttacctaccgtcgcggtgataggcagcggcaccatgggcgccggcattgccgaagtggccgccgccgccgggcatccggtactgatttacgacatcgcccctgaggcggtggttcgcgccatcgacgggattcgccagcggctggcctcccgcgtcagccgcggcaagctggcggcggaacaggccggggcgcttctgacgcgtctgtctccggctgaggatctgagcgctttagcccgtgcggagttggttattgaagccgcctccgagcgcctggacgtgaaaaaagcgctgttcagacagctggccgaaatctgctccccgtcgacgctgctggtcagcaacacgtcgtcgatatcgatcaccgccatcgccgcgggaataaaacacccggagcgggtcgccgggctgcacttctttaacccggccccggtaatgaagctggtggaagtggtcagcggcctggccacctcggcggaagtcgttgaacagctctgcctgcgggtcagcgactggggaaaacagccggttcgctgccgctcaacgcccggctttatcgtcaaccgcgtggcgcggcctttttatgccgaagcgtggcgagcgctggaggagcaggtcgccgcgccggaggcgattgacgccgccctgcgcgacggcggcggttttcccatggggccgctggcgctgaccgacctgattggccaggacgtcaactttgcggtgacctgttcggtatttaacgccttctggcaggaccgccgctatctgccgtcgctgctgcagcaggagctggcgctggccgggcggctgggtaaaaagagcgggcagggggtctactgctggcctgctgaggcacagcctgagctggagctggccgccgtatcggcagaacgggcagcaaagcgtataaaacgtgacgttgtcaccgagctggacgaggtgctgctgctggaaacgaccggtgaaaccgccctggcgttaagccttcagcacggccgcccggtggtggtctacgaccatagcgcaggcgatacggtggtgctggccagcgcggaaaccacctctcaggcggcgatcgataaagcgactttctattttcagcagcagggcaaaaaggtgctgcagatcgccgactatcccggcctgctagtgtggcggacggtggcgatgctggttaacgaagcgctggacgcgctgcagaagggcgttgccagcgcggaggatatcgataccgccatgcgtctgggcgtcaactacccgcacggcccgctggcgtggggtgaatcactaggctggggccgggtgctgcggctgctggaaaacctgcagcagcactacggcgaagagcgctatcgcccctgttccctgctgcgccagaaggcgctgatggagagacatcatgagcaatgaagcctggcacaacgcccgcgcgatgtacgagaacgataactgtgcgaaagcgctgggaattgaaattatcgcgatggaccagggctacgcgcagatgaccatggcgatcgccccgaacatgctcaacggccaccatacctgccacggcggacagctgttttcgctcgccgataccgccttcgcctacgcctgcaacagccaggggctggcggcggtcgcgtcggcggcgagcatcgattttctgcgtccggcctttgtcggcgagctgctgaccgcgacggcgagagttaagcatcagggcaagctgaccggggtctatgacatagaaattgttaaccaacagcaaaaagttgtcgctctgttccgcggtaaatcgcaccgcatcggcggcacaatcacaggagaagtctgatgcgcgacgcctttatttgtgacgggatccgcacgccgattggccgctacggcggggcgctggccagcgtgcgcgccgacgacctcgccgccatcccgctgcgcgaactgctgagccgtaacccgaagttcgatccggcatcgatcgatgatgtgattctcggctgcgccaatcaggccggcgaagacaaccgcaacgtggcccatatggcgacgctgctggcgggctatccgcacaccgtacccggtaccaccattaaccgtctgtgcggctccggtctcgacgctatcggcttcgccgcacgcgccatcaaagccggagaggcggatctgatgatcgccggcggcgtcgagtccatgtcgcgggcgccgtttgtgatggccaaagccagcgccccctggcagcgccaggccgagctgtttgataccaccatcggctggcgttttgtgaacccgctcatgcagcagcgatttggcactgacagcatgccggaaacggcggagaatgtagctgaattgttaaatatcagccgcgccgatcaggacgctttcgctttccgcagccagcagcgtacggctcaggcccagcgcgacggcattctggcgcaggagatcgtaccggtaaacgttgtcgacaggaaaggagcggtacacgtagtgcgcgacgacgagcatccgcgggcggataccaccattgaacagctttcgcggctaaaaacgccgttccgtcagggcggcgtagtgaccgcgggaaatgcctccggcgtcaacgacggcgccgcggcgctgattatcgccagctcgcagcaggccatcgtccaggggctgacgccgcgggcgcgtattgtggcgatggcgacggcgggcgtcgagccgaagctgatggggcttggaccggtaccggcggtacgtaaagtgctggagcgcgccgggctgagtataaacgatatggatctgattgagctgaatgaagccttcgccgcccaggcgttgggcgtgctcagacagctggggctggaggatgatgccccgcatgttaaccccaacggcggcgccatcgccttaggccatccgttgggaatgagcggcgcccggctggcattaagcgccagcctggagctgcagcgccgcggcgggcgctatgcgctgtgtacgatgtgtattggcgtgggtcagggcattgccatgatccttgagcgagtgtgagcgaatctacctgcgagtaccctacaaaatgacaacgataactcaattagacccgattgaaaccgcatcgcgcgacgagctacaggccctgcaaacccagcgtctgaagtggacccttaagcatgcgtatgagaacgtgccgatgtatagccgtaaatttgacgcggcgggcattcatcctgacgattttcacgaactgagcgatctgagcaagtttccctgcaccaccaagcaggatctgcgcgacaactacccctttgatacctttgcggtgccgatggagcaggtggtgcgtatccacgcgtcttcgggcaccaccggcaagccgacggtggtgggctatacgcaaaacgatattgataactgggccaatattgtcgcccgctccctgcgcgcggcgggcgggacggcaaaagacaaaattcatgtcgcctacggctatggtctgtttaccggcgggctgggcgcccactacggtgcggaacgtttaggcgcgacggtcattcccatgtccggcgggcagactgaaaaacaggcgcagctgatccgcgatttcaagccggatatgattatggtgacgccgtcctactgtctgaacctgattgaagagctggagcgccagatgggcggcgacgccagcggctgctccctgcgggtgggcgtgttcggcgcggagccgtggacccatgcgatgcgggcggaaatcgagcgtcgtctgggtatttcggcgctggatatctacggtctgtcggaggtgatggggccgggggtggcgatggagtgtctggaaaccgccgacggtccgacgatctgggaggatcacttttaccctgaagtagtgaatccggacaccggcacgccgctggcggacggcgaacacggcgagctgctgttcaccaccctgactaaagaagcgctgccggtgatccgctaccgcacccgcgacctgacgcgcctgctgccgggcaccgcccgcaccatgcgccggatggatcgcatcagcgggcgcagcgacgatatgctgattatccgcggcgtgaacgtcttcccgtcgcagctggaagaggagatcctcaagttcgaacatctggcgccgcactatcagctggaagttaaccgccggggtcatcttgattcactttcggtgcgcgtggagctaaaagagagcggtctggcgctgaaccacgagcagcgctgtcagatttgccaccagctgcgccaccggatcaagtcgatggtggggatttcgaccgatatcagcattgttaactgcggcagcattccgcgctccgagggtaaggcctgccgcgtgttcgatctgcgcaaggtggccgctaacggataacgcattctcccggaagcggcgcattgcgcctgtccgggctacccgatgccgcaactcccttggcctggaaagtggtagcccgggtaaggcgtttacaccgcgacccggggagtgtgccggggttgatgtatcagctctgcttcttcccggctcgcgctgcgcttagccgggctacgaattcaccgttgtctgcggggccggtagcccgggtaaggcgtttacgccgcgacccggggagtgtgccggggttgatgtatcagctcggcctcttcccggctcgcgctgcgcttagccgggctacgaattcaccgtcgtctgcgagccggtagcccgggtaaggcgtttacgccgcgacccggggagtgtgccggggttgatgtatcagctctgcctcttcccggctcgcgctgcgcttagccgggctacgaattcaccgccgtctgcgggccggtagcccgggtaaggcgtttacgccgcgacccggggagtgtgccggggctgatgtatcagctcagcttcttcccggctcgcgctgcgcttagccgggctacgtgttcaccgtcgtctgcgggctggtagcccgggtaaggcgtttacgccgcgacccggggtgtgtgccggggttgatgtatcagctctgcttcttcccggctcgcgctgcgcttagccgggctacgaattcaccgttgtctgcgggcgggtagcccgggtaaggcgtttacaccgcgacccggggagtgtgccggggttgatgtatcagctctgcttcttcccggctcgcgctgcgcttagccgggctacgaattcaccgttgtctgcgggcgggtagcccgggtaaggcgtttacgccgcgacccggggagtgtgccggggctgatgtatcagctcggcctcttcccgggtcgcgctgcgcttagccgggctacgaattcaccgtcgtctgcgagccggtagcccgggtaaggcgtttacgccgcgacccggagagtgtgccggggctgatatatcagctcagcttcttcccggctcgcgctgcgcttagccgggctacgtattcaccgtcgtctgcggggcggtagcccggacaggtgcgcagcaccgcctccgggatttcctgtgctatgattcaaaaaggacaaaaatcacaacagaatgaatcagatgagtaaactcgacacctttattcaacaggccgtcgccgcgatgcccattagcgggacctcgcttattgcttctttatacggcgacgccttgctccagcgcggcggagaggtctggctcggcagcgtggcggcgctgctggaagggctcggattcggcgaacgattcgtgcgtaccgcgctgttccgcctgaataaagaagagtggctcgatgtggtgcgcattggccgccgcagcttctaccgcctcagcgacaaaggcctgcgcctgacccgccgggcggagcataaaatctatcgcgccagcgccccggagtgggacggtacctggctgctgctgctgtcggaagggctggagaagagcactctggcggaagtcaaaaaacagctgctgtggcagggatttggcgcgctggcgccgagtctgctggcttcgccatcgcagaagctggcggacgtgcaatctctgctgcacgaagcgggcgtagcggagaatgttatctgcttcgaagcgcattccccgctggcgctctcccgggcggcgctgcgcgctcgcgttgaagagtgttggcatctcaccgagcagaacgcgatgtatgacgcgtttatctccctgtttcgaccgctgctgccgctgcttcgcgactgcgagcccgcggagctgacgcctgaacgctgctttcaaattcagctcctgctgattcacttctatcgccgggtggtgctgaaagatccgctgctgcccgaagaactgctccccgcgcactgggccggacaaaccgcgcgccagctgtgcatcaatatttatcaacgcgttgcgcccggcgcgctggcgtttgtcggcgagaagggcgaaagctcggtgggggaacttcccgcgccggggccgctctatttccagcgcttcggcgggctgtcgggcgtataaggaggcaccatgcccatttatcagattgacggtatgacgccggttgtaccggacgaaagctatgttcatcccaccgccgtgctgattggcgacgtgatcctcggcaaaggggtctacgtcggccctaacgccagcctgcgcggcgattttggccgtatcgtggtgaaagatggcgctaacatccaggataactgcgtgatgcacggctttcccggccaggacacggtggtggaagaagagggacatatcggccacggcgcgattctgcacggctgcaccatcggccgcaacgcgctggtggggatgagcgcggtgattattgacggggccaggattggggaaaacagcatcgtcggcgcttcggcctttgtgaaagccaacgctgaaatgcccgccaaccatctgattgtcggcagtccggcaaaagccattcgtacattaagtgaacaggagctggcctggaagaagcaggggacgcgggagtatcaggtgctggtggagcgctgcaaacagacgctgcatcaggtggaaccgctcaaagaagcagagccggacagaaagcggctgatctttgacgagaatttgcggccgaaatcatcatcctgaggggaaaatcatggcagagaaattatccgctcagtgccactgcggcgcggtggcgtttaccgttgagcttagcgatggcttcaacaccgttcgccgctgtaactgttcatattgccggatgcgtggggcggttgcggtctccgcgccgctttcaggaatagaggtggtgcgcggacgggataagctcacggagtatcgttttaataccggtcaagccgtgcactttttctgctcggtatgcgggatttacacttttcatcagcggcgttcaaacccgcagcagtacggcgtgaatgtggcctgcattgacggcgtgtcgcccttcgattttccctgcgtggaggtcaacgacggcgtgaatcatccgaaagatggcggcggtggcgtggtggggtatttgcgctacgagaaaaagtgaaactctcctcccgccgggaagcgggaggagtcaactcttatgcggctacaacgctgtcgatagcggctttcgcatcagactgcgctttcgctgcgacttccgggccgtaggcgatgccttcagcaaacacgaagttcacatcggtaatgccgataaagccgaggaaggtggagaggtaaggggtcaccagatcggtcggggtatctttatggatacccccgcggctggtgacgacaaccgcacgtttacctttcaccagaccttccggccctttctcggtgtagcggaaggtcacgccagcgcgcgccaccaggtcgaagtagtttttcagctgggtcgggatgttgaagttgtacatcggcgccgcgataacaatcacatcgttcgcctgcagttcagcgatcagttcgtcagaaagcgccagcgcttcctgctgacgcggcgtcagcggcgcgtcgctcggacgcagagcgccaaccagctcgccgtccagtaccggaattgggtttgcagccaggtcgcgcacggtgataacgtcttccgcgtgcttttcacgccattgttcaacaaaatagtcggacagctgaccagattgcgagtaccctgccagaatactggatttcagaactaatactttgctcatgggtgtttccttttttaatgtgattgacgggccgatgccctggtgcttgttgacactctattcacaatcatgccacagagaaagcgcaataaatcgaactctgtattcagtttttttgaacaaggcacgaaatgcgcggatgtggtactctaacgcaatacttcaaaagagatttttcccggcagtgcgctgcccgataacgctatgacagaacaacaaaaaataaccttctcatcgctctttgaacggcttgatggcctgatgctgcgcgataagtcgcgcttctcccgtcgcctgcacggcgtgaagaaggttaaaaatcctgatgcccaacaggccattcttcaggagatggcgcaagaaattgaacaggcggcagggagagtcctgctgcgcgaagccgcgcggccggcgatcgcttatccggaaaacctgccggttagccagaaaaaacaggagattctcgaagccgttcgcgatcaccaggtggtgattgtggcgggggaaaccgggtcggggaaaaccacccagctgccaaaaatttgtatggagctggggcgcggcgttaaaggcttaattggccatacgcagccgcgtcgcctggccgcgcgtaccgtcgccaaccgcatcgccgaagagctgcaaacggagccgggcggctgcatcggctataaagttcgctttagcgaccacgtcagcgataacaccatggttaagctgatgaccgacggtattctgctggcggaaatccagcaggaccggctgctgatgcagtatgacaccatcatcatcgatgaagcgcacgaacgcagcctcaatatcgacttcctgctgggttatttgcgggaactgctgccccgtcgcccggatctgaaaattattatcacctcggcgaccatcgatccggaacgcttctcgcgccactttaacaacgcgccgattatcgaagtgtccgggcgcacctacccggtagaagtgcgctatcgacccatcgttgaagacgccgacgacaccgagcgcgatcagctgcaggcgattttcgacgccgttgatgagctcgggcgtgaaagccccggcgatatcctcatttttatgagcggcgagcgcgaaattcgcgataccgccgatgcgctcaataagctgaatctgcgccataccgaagtactgccgctgtatgcgcgactgtccaacagcgaacagaatcgcgtgttccaggcccacagcgggcggcggatcgtgctggccaccaacgtcgcggaaacttcgctgaccgtgccgggcatcaagtacgttatcgatccaggcaccgcgcgtatcagccgctacagcttccggactaaagtacagcgcctgccgattgagccggtttcccaggcgtcggctaaccagcgtaagggccgctgcggccgcgtctccgaagggatctgtattcgtctttattctgaagacgacttcctgtcgcgtccggagtttaccgacccggagattctgcgcaccaacctggcgtcggttattctgcaaatgaccgcgctcgggctcggcgatattgccgcgttcccgttcgttgaagcgccggacaaacgcaatattcaggacggcgtgcgcctgctggaagagctgggagcgattactactgacgaacagcagaccgcctataagctgacgccgatgggccgccagctgagccagctaccggtggacccgcgtctggcgcgcatggtactggaagcgcaaaaacacggctgcgtgcgcgaggcgatgattatcacctcggcgctctctattcaggatccgcgcgagcggccaatggacaagcagcaggcgtccgacgagaaacaccgccgcttccacgacaaagagtccgactttctggcgttcgtcaacctgtggaactacctgggcgagcagcaaaaagcgctctcctcgaaccagttccgccgccagtgtcgggttgattttctcaactacctgcgcgtgcgcgagtggcaggatatctacacccagctgcgtcaggtggtcaaagagctcggcctgccggtcaatagcgagccggcggagtatcgcgaaattcataccgcgctgctgaccggtctgctgtcgcacatcggtatgaaagacgccgacaagcaggagtttaccggcgcgcgcaacgcccgcttctccatcttccccggatcggggctgtttaaaaagccgccgaaatggacgatggtcgccgaactggtggaaaccagccgcctgtgggggcgcatcgccgcgcgcattgagccggagtgggtcgagccggtggcgcagcatctgatcaaacgctcgtacagcgaaccccactgggagcgcgggcagggcgcggtgatggcgacggagaaggtgaccgtttacggcctgccgattgtcgctgcccgcaaggtcaactacagccagattgacccggcgctgtgccgcgaactgtttatccgccacgcgctggtggagggcgactggcagactcgccacgctttcttccgcgaaaacctgaagctgcgcaacgaaattgaagagctggagcataaatcacgccgtcgcgacattctcgtcgatgacgaaacgctgtttgagttctacgaccagcgcatcagccatgacgtcatctccgcgcgccactttgataaatggtggaagcaggccagccgcgagacgccggatctgctcaactttgaaaagagcatgctgattaaggaaggcgcggagcaggtcagcaagctcgactatccgaacttctggcatcagggcaacctcaagctgcgtctgacctatcagttcgagccgggcgccgacgccgacggcgtgacggtgcatattccgctgccgctgctcaaccaggtggaagaggccgggtttgagtggcagatccccggtctgcgccgggagctgattatcgccctgattaaatcgctgccgaagccggtgcgccgcaattttgtcccggcgccaaactacgcggacgcgtttctcggccgcgcgacgccgctggagctgccgctgctggattcccttgagcgcgaactgcggcggatgaccggcgtgactattgaccgcgaggcctggcagtgggatcaggtgcccgatcacctgaaaatcactttccgggtggtggacgacaaaaataagaagctacaggaagggcgctcgctgcaggatctgaaagatgccctgaaaggcaaggtacaggagacgctgtccgcagtcgccgatgacggtatagagcagagcgggctgcatatctggagctttggccgcctgccggagagctacgagcagaagcgcggcaactataaagttaaggcctggccggcgctggtggacgaacgcgacagcgtggccatcaagctgtttgataatccgctggagcagcagcaggagatgtggcgcggcctgcgccgcctgctgctgttgaatatcccatcgccgattaaatatctgcatgagaagctgccgaataaagccaagctggggctctatttcaacccctacggtaaagtgctggatctgatcgatgactgcatcgcctgcggcgtggataagctgattgacgaagcgggcggcccggtatggagcgaagagggctttgccgcgctgcatgaaaaggtgcgcgccgagctgaacgagacggtagtggacattgccaaacaggtcgaacagatcctgaccgcggtctttaacgtcaacaaacgcctgaaagggcgcgtggatatgaccatggcgctggggctgtcggatatcaaatcgcagatgagcgggctggtgtatcgcggtttcgtcaccggtaacggcttccgccgccttggagacacgctgcgctatctgcaggcgattgaaaaacggctggagaaaatggccatcgatccgcaccgcgaccgcgcgcagatgcttaaagtggagagcatccagcaggcgtggcagcagtggctgaataagctgccgcctcagcgccgtcaggatgacgacgtgcaggagatccgctggatgattgaagagctgcgcgtcagcctgttcgcccagcagctcggcacgccgtatccgatttccgacaagcgggtactgcaggcaatggagcagattacggcctaggccgccgctttccccggtggcgcaggctgccggggaaggtggatagcgtcaggcgttcacccacgcgagggtgaacccatcccagcctttgctgcccacggtttgcagggccgtgaccgtcagtcgcgggtcgctgcccatcatgtcgataaacgctctgacaccctgcacccgctcatccgcgctatccggattcgtcacttcgccatcgcgcaccacgttatcgcccacaatcactgtccccggacgggaatagcgtaacgcccagcgcagatagtggggattattgggcttatccgcatcgataaaaatgagatcgaacggcgggcgctctcccagcgtttcgaggctggccagcgccggaccttccagcaccgcaacgcgatcgtccacgcccgccaggcgcaggttctcgcgggcgacggcggcatggtgcgcgtcggcctccagggtaagtaattcgccatcggcgggcaattctctggccatccagatggtgctgtagccgccgagcgtgccaatctcgaggatgcgtctggcgcccgtcatgcgcaccagcagggccagaaactgcccctgattagcggcaacgtcgatagccggaagcccggcgcgctggttattctccagaacctggctgagtagcggatcggtggggattaacgctgtcacgagataattatctactgccgaccactgttgttgcatgtcagatttcccgtattacatccctgatgaatcagaccagccgcctcccagcgaccggtacaaatcaacttgcgccagcagcaggttgtttttcacctgtaccacgctgagctgggtggaaaacagcgtgcgctgggcgtccagcacgtccagataggaggagtagccgttgcgatagcggttttgcgcgatgcgcagcgtctcctgggccaccttctcctgcgcctgcagctccgccagctgctcgccgtagcggccgatggcatcgagactgtcattcacctctttaaacgcgccgcgtaccgttttctcatagctaaacagcgcctgattgcgctgggccatcgaaacgtccacctgggcattcagcgcctggcggttgagcagcggcgccagaatgctgccgccgaggctccataagcgtagcggattatccagcaggtcgggcagggtgcgatcctgcaggctgccggtggcggtaaggttaatggacggcagcagctgcgcctgcgatgacgccagggtagcgtcggcggccaccagctgacgctgggcctgaacgatatccggtcggcggttgagcagggttgacggcagctgggaaggtagcgatagcggcgacagctgcgcgaacgcgttgcgcttaacggcgtccggattggcgccgagcagaaggctgagcgcattttcctgctgggcgatttggtggcgcagcggcggaatttgcgcgcgcgtggagcgcagttcggagtccgcctgcatcagctccaggcgtgaggtatagcccgtctcaaactggcgcttcgccaggttgaaggcatcttcgcgcgattttaacgtttgctgcgtcacccgcagctgttcatccagcgagagcagggtgatatagccggccgccaccgaagaggcgacggtcagattcgccgctgcggcagccgccttttgcgcctccaggctggcttgcgccgcgctggcggcgctgcggtttgcgccccagagatcaacatcgtagctggcggttagcgcgcctttatacaccgtactgtggacaggcaggccggtagcggccgactgggaccgcgcgcgggtgccggtcaatccggcgtcaagggagggaaacaggctgctatcggcggcgtaagcccgcgcctggtactcgttgacccgttcgcgggctatcagcacgtcgctgttgtagcgcagcgcctggtcaacgtagagattgagcgtactgtcgtggaagttgcgccaccacaccccctcaaccgggctggaggggccgacatccgcccgccaggcggcggggatctgcagcccgggcgcggcccgttgaacgtcggcggactggcagccggccagcgcaagcataacggcgagagcgagcggacggatcattgctgctcctccgcgcgggtatcgatggtgacctgcaccgacatgcccggccgcaggcgctggccgtttttctgcccctcatcaacggcgatgcgtaccggaatgcgctgggcgattttgacaaagttaccggtggcgttatccggcgaaatagcgctgaactccacgccggtcgccggggagatgctctgcaccgtaccggtgaatttctcgctgttcagcgcatccacggtaaaggtcaccggctgtccgacgcgcacctgggccagctgggtctctttcaggttagcgatcagccagtgctgcggcggcaccagcgaggtcaaatgcgtcccggcggtcacgtatgcgccaaggcgaacggagatttgcccaagctgaccgtccgtcggcgcgataatacgggtgttttgcaggtctatctgcgccagctccagcgcggctttcgcattggcgacgtcggcgagcagcgagtcacgattaacgatggttgattgcaaatcctggcgcgacatttccagcgttgctttggcctgctcgatatccgcggtgccctgcgccgcgctggcgcgggcggaatcgcgttcgcgaatcgatagcgagccgtcggcggtcagctcctgaacgcgttttaaatccgcctgggttttcagattctgcgcgcgggcgttttgcagcgccgcttcgttacgggtgatgaccgcttcggcgcttttacgctgctgctgattgttcttcagcgccgcctctttcatcgccagctgagcttccgcctgatggacgcgctgcttatagatgcggtcgtcgatttgaaacagcacgtcgccggcttttacctgattaaaatcctggaccttaacctcggtgatataaccgttgacctgcgggctgataaacgtggtttgcccgcgaacgtaggcgttatcggtaaactggctttctcgggtaaacggcggcagctgccaggcgtagagaataaccagtacgccaacgatgccaatggcggcggcggtaaaaatagagacgatgcgaatattatttcgggtattggcctgctgtttggccgcatcctgctgactcataataactccagagtgaaaatttttatttgcttcccgtcgcgcgcttcagcgcgatacgagcggtaatacgtaatcttattaagcgccagaaaacccataccagcgtggcggctgaaatcgccgccgtcagcagataggtatcattgtaagcgagaatattggcctgcagggtggcggcgttttgcagcagcgtggtggcctgaacgttgagcaacgtgctgtcgccaatctggctttgatacatctgactgtactgctgcaaacgctcggtaatcagcggattgagcgtggtgagctggtcggcgagctggctggagtgaaacttctcccgccaggtctgaaaggtgccgagaatagcggaacccagcaggccgccgatattctggctcatgccgaacagcaccgagaagctcaccaggttgcgctggtcggcaatgacgccgccaatccccgccagcatcgccggggcgaggaaaaaggcgctgccgaagcccagcagaaactggctgaacatcagctgctccggtcgcgtgaggatcgtcgactggctgtcgagcagcgaggcaaccataatcaacgccagcgccgtggcggtgggccagtagaggcgctgcgggttgagcgtcaggcagctggcgacgatgccgcagacgatcccggcgaaaatcgaccatgccaggttggtcatctgttcattctgcaaacccacgtactgcagccagccgataacgccggtattctgctccgccagcacgatgcggatcagcagcataatcagcccgaggcgcagaatactgccgctggagagccatttgatattgagcagcgggttgctgcggttatgctcaaaggcaatcgcggagacaatcagcaccaccgcgcccgccagcgcccagccgatccacggcgcttcaaaccaccagtccagccgtcccagcgacagcaccgcggtgaccagcgccatccccggcgccagcaggaagaaggtgatgaagtctttcttctcaaacacctttttacgatcgcttggcggcagcttgagggcaatcacgcaggccagcgacaccagcgccagccccagctcaaagaagtacagcccgcgccactcgtcgatttgcagcagctcggttgagaacaggcgcgccagcgggatcgccagggatgaaccggtgatgccgatggtcagcgctttgagccgatggcgggcgggccaggcctgtacctgataataaatccccagcgagcttagcgctgcggctaccatgccgtgggcggcgcgcaccatcagcgctgaactgaggtcgttaacgaacaggtggaaaaaggtcaccagcacgtagagaacgagaaaaccctcggtaaaagcgcgcaggccgaactgctggcgaaacttcaccagcagcaggttgatggagacgttggtcatcacgtagaccgccgggagccaggcaatctcggttgaccaggcggcaaaagtaccctgcaacagctgcagattggcggttaccaccgcgttgccgagcgcgcccgtcaggcagaccagcagcccgacgatcccgtaggcaatacgttttggcgtactgtgaatgggggtcgacggcgagccgaggatcgccggtttttcgtgcggggcccagtcgtgaggaacatagggattagcgtgacgacgcggcattattttttctcaacctcgcgcagcagcttctccagtacccgctgcgtctgccgctgctcttcgggggtaatggcggtaaggatctcctcccgcaaatcatcggccaccgttttcacctgctgatacacctcaaggcctttggcggtagcgatcagcagtcgtttacgcttgtcgcgttcggttttcacccgctcgaccagaccgagatcgaccagccggttgagcagcggtacgagggttgcgctttcgacgccgagctcctgggccagctcgctttgcgatagcggcttttcgttacgcgcgatggcggaaacggcgacccagctggcctggctcatgccgaggtccttgagccgacggttgaccgccaggcgccagtggtgggcggtcagatataaaagatgggaaaagttaagctgtcggttatccataggtcagtctgcaatatcgttagagctctaatgatttttgcctgaccagaacgagaattcaagcctgattgataaaaacaggttaacggtatgtgcgtttattgtggaagatgctttgggaggggggaagagagttctgatctcagcccggcattaaccgggctgagaagggggattatcccggataaataccgcgatctttacgcgccatcagaatccgctcacaggccacgatataggcggcggtacgtaaagagcacgctttttccaccgctttttcgtaaacgtgaacgatcgcatcggtcatgatacggtccattttggcgttgatctcttcttcgctccagaagaagctggccatatcctgcacccattcgaagtagctcacggtgacgccgccggcattacaaataacgtccggcaccaccacgatgccgcgctcggccagcacgtcgtccgcttccggataggtcgggccgttagcgccttcaagcaccagtttgcagctgagggtttccgcgcgctcgcgcgtaatctgaccttccagcgccgccgggatcagaatatccatcggcgtcgtccagaacgcttctttgtcaatttcgcgggcgcccgggaagccggcaatttgcttgttctccgcctgccatgcggtcagcgcggccatatcaatgccgccctcgttatacagcgtggcggtgtggtcctgaatcaccacaatacgcgcgccgacgcccgcgaacaggcgggccgcttcgctgcccacgttaccaaaaccctgcagcgcgactttggcaccctcgatttcgataccgctgcggcgagccacttcgcgaccggtgacgaatacgccgcggccggtggctttttcacggcccagcgaaccgccgaggtgaataggcttgccggtgaccacgccggtgatggtggtgccgtggttcatggagtaagtatccatcatccaggccatcactttaccgttggtaccaacgtccggcgccggaatatctttttgcggcccgatgataatgccgatctcgctggtataacgacgggtcaaacgttccagttcaccctctgatagtgagaacgggtcgacgcggataccgcccttggcgccgccgtagggaatattgactgccgcacacttgatggtcatccaggctgaaagcgccatcacttcattcaaatcgacatccggatggtagcgcacgccgcctttacccggtccacgcgagaggttgtgctggacgcggtagccttcgaagtggcggatagtgccatcatccatttgtaccggaatatcaacgatcagcgcgcgtttcggatggcgcagggtttcgatccagtaggcgagatcgccgagatagggcgcaacgcgatcgatttgacgcaggtaggtggtccatggagatgtactactttcagaagcgtaagataacttttccataagagtcctgtttcgcagtgataattattttgttaaccgtggaaaggtacagctataaactctgtaacgagaatgttatcaccaatttaatgggacggtatttggcaaaaatgcagaatatgctgtcgttgcggctggggttcggctttttatgaataaaaaaacggaaaacaaggccatcaatggatgaatatgcacctttgtgcattaaagccgtagttgtgaccctttatctctatttatcagaatcttgaccctcttcaaaaagtgaataaaacgctatgtatatgtgttgactttgttgcttaacaggcgtgggtgttctgttcgcactttattaccctaaagtatgctgtaccgtctaagatggtggccggtaatgtcaggctaagaacgctaaaaggagagaacatgtcagagcattttccatcgctgccggaggcggtactggccgcggcgaaccagctgggggcctggctggcgcaggatgatttaccgcaggatccgcaaatagagctggtggtgctggcaggcaatgcggtgatcccgaccattgatttcgcctgccggctggcggcgcatcacgccgttcctctgctgatcagcggcggtatcggccactccacctcgtttttataccagtcggtgctgaatgacccgcgctatcgcaccattccggtagacgatcgcgccgaggcgcatattctggccgacattgcccatcagttctgggcgattccgcgccaacgaatcgtggtggaagaccgctccaccaactgcggcgagaacgcgcgttttacccggcagatgctggagcacaacggcattgcgcaccgtacgggggtggtggttcaggatccgaccatgcagcggcgaacgatggcgacatttgcccgcgtctggcaagacgacccgcgtgcgccgacgtggtacagcgcgccgggctgttcaccggtgttgtgtaacgggcgtgacggcgtcacgttcagcgggaaagaggcgggtctgtggccggtggggcgctatctggcgctgatcctcggtgaactgccgcggctggcggataacccgcagggctacggcccccagggtaagggatttatcgctcatgtggatattccgccgtacatcgctcaggcgtggcagacgctgcgcgacgaccgcctgctctccgatgcgctaagcgcgcgtcagctggcttagaagatggcgcggcatgccatgatagccagcccgcgtttccccttcgaacgcaggacctattagccggtaactctcatcttgcccgtttgcgttagcgatatcgcaaacgggcatcatctgttattgaattgtgattctttacgccccgggttgctctgtttttatgaaatatctcacaaaaacaagcgctcatgctgtccctttgcctgatggacgataatttttaacatctagttcacctgttaaaaacaataatcctgaggagcagaccatgacagcacccgttcaacaccctatgtatattgacggccagtttgaacccggccgcggtgatgcatggattgatgtgatcaatccggcgacggaagcgctgctttcgcgtattcccgacggcagcgcggaagatgcccggcgcgcgattctggccgctgagcgcgcgcagccgggctgggaagccctgccggcgattgagcgagcggggtggctgcgcaaaatcgctgccggtatccgcgagcgggccgaggagatcgccgcgctgatcgtcgccgagggcggaaaaatacagcagctggccgcggtggaggtctcctttaccgccgattatctggattatatggccgaatgggcgcgccgttatgaaggtgaaattgtacagagcgaccggccgggggaaaatattctggtattcaagcgcgcgctgggcgtgaccaccggcattctgccgtggaattttccgttcttcctgattgcccgcaagctggcgccggcgctcattaccggtaataccatcgtgattaaaccgagtgaatttacgccgaataacgccatcgcttttgcgcaaatcgtccatgatatcggcctgccgaaaggggtctttaacctggtgctggggcgcggcgaaaccgtgggccaggagctggcgagcaatccgaaagtggcgatggtcagcatgaccggcagcgtcgccgcgggcgagaagattatggccgcggcggcgaaaaacatcaccaaagtgtgtctggagctgggcggtaaagcgcccgctatcgtgatggacgatgcggatcttgagctggcggttaaggcagtggtggattctcgcgtcattaatagcgggcaggtgtgtaactgcgttgagcgcgtctatgtgcaaaagggcatttacgatcgcttcgttaaccgtctgggtgaagcgctgaaggcggtgcagtttggcgatccggcgtctcgcgacgatatcgcaatgggaccgttgattaacgccgccgcgctggagcgcgtggagcagaaggtggcgaaagcggtggcccagggcgcgcgcgttgtcctgggtgggaaagcggtgacgggtaagggctatttctatccgccgacgctgctgctggacgtgcgccaggagatggatatcgtgcatgaagagacgttcggcccggtgctgccggtggtggcgtttgatacccttgaagaagcgctggcgatggccaacgactgcgattacgggctgacgtcgtcaatctatacccgcgatttgaacgtcgcgatgaaggcgatcaaagggttgaagtttggtgaaacctatattaaccgcgagaatttcgaagcgatgcagggtttccatgccggatggcgtaaatcgggcatcggcggcgccgacgggcgtcatggtctgaatgagtatctgcaaacccaggtggtctatctgcaggcctgagtcagcagagaaccggtgggcttcccggaggcgatgctgcgcatctgtccgggctaacccagcccgcagaccgcctcccgggtcgcggctgacgccttacccgggctacccaaacgcatgccgcacgtacctgtagcccgggcaaggcgcgttgcgccgcccccgggatttatttggcgaacttatccagcacgcggataagctgggtaacgaagccatactcgttatcgtaccaggagacggttttcaccagctggagatcgccaacctcggcaatctccagctgcgtggcgtcataaatggaaccgaaatggctgccaatcacgtccgacgagacgatctcctcttcggtgtaaccgaatgattcgttgttcgtcgccgcgtttttcatcgcctgattgacttcttcagcggagacctttttctccagcaccgacaccagctcagtcaccgacccggttttcgtcggtacgcgctgggcgtggcccttcagcttgccgctaagcgctggaataaccagcccgatggctttcgccgccccggttgtatgcggaatgatattttccgccgccgcgcgggaagcgcgtagatctttgccgcgggggccgtcaaccagcgattgcgtaccggtataggcgtgaatcgtggtcatggtccccaccttaataccaaaggcgtcattcagcactttcgccatcggcgccaggcagttggtggtgcaggaggccacggaaataatcgtatcgtttgcctccagcgtgtcgtcgttaacgttatagacaatggttttcatatcgccagcgggcgcggagataagcacttttttagcgccggcggtcagatgagcttgcgctttttccgcggaggtataaaaacccgtacactcgacgatcagctcggcaccgaccgctttccacggaatatgctgagcctctttttcggcataaacggtaatttttttgccgtcaacgataagcgcatcttcagtaaaatcgacgctccacgggaaaggtccgtagttagaatcatgcttaagcaggtaggccagtaccttaggggaggtgaggtcgttgatggcgacgacctctaaaggactattaacctccagtaatcggcgcagtactaaacgtccaatacgcccaaatccattaatcccgagtttactcatgaagaatctccaggtcagttgaactgtcaggtgaaaacttctccaggcttagttcagctggcgggatagggcaaccaacgatttttccggcgccgttaaatgctgataaaaacgcgtacggaaaagtgaataaattcggcgggttgtgggcggggcgttaagggttaataattttttgtttcagctttatacgccgcgggtatattggcaaggggttgaaaaggtgggcccgggaagggcccgccgggtggccgattattcggcgttcccgccccgttcagcaaaagcggcaagcgcggcgccgtcaaggcgatagcgaacccactcactttgcgcaacggcgccaatgctcagataaaaatcaatggccggctggttccagtcgagcacgctccactccaggcgaccgcactctctttttaccgccagctgagcgatggttcgcaatagcgcttttccagcgccgcggccgcgaaattcgggagtgacgtacagatcttccatatagatgccgttgcgaccgagccaggtggaatagctggtgaagaacaccgcgtacccggcaaccttattgtcaatctcgcagattagcgcttccgttttgctgtcgctggcgaaaagcgatgcctggatttcatctaccgtggtgaccacctgctccggcgctttttcataaaccgcaagctcgtaaatcatgtcataaattgcttttacgtccgccgggcgggcctgacgaatggtcatattcattggagtacctgttgtgccatcgtgagtttgataccgccaagcataaacgttaaggttagaagaattaagtgcaatgaaatcacccaatgatgaatattatgcatcctgcgcttcgccgtcttgatttgaatctgctgccggtatttgaggcggtctaccgctatcgttcggtccgcctggcggcggaagagctggcgatgagcacatcggcgttaagccacgcgctatccagactgcgcgccgcgctcaatgacccgcttttctatcgcgaaggtcatcgtatgtgccccagcgtatacgccacccagctcgcgccttccatcgcttcggcgctcaagtttttagatcaggagcttactccgcagccgaagtttgtggcctcggccagtaccgactgcctacagatagcgatcacggacttcaccgcgcagtgcgttttcccgacgctgatgcccaggctacagcagcaggcgccaggcctgcgtttcgaactgcgctatctgccgcacagcccggcgctgacggaactgctggccggcgaggtggatttagcgctgggatttagcgcgctggatgaagcagagcatccggagctggatgagatttgctggctgaaagatgattatgttgcgataagcagcgccaggcgatcccggctcacgctggcggactacctggcagcacggcatctggtagtcaccccgtggaatgaaagccagggcgttctcgacgtgcagcttgcgaaaatgggcttctcgcggcatatcaccatcaaaaccccctctatgctgagcgcgccagctattattgcgcaaagtgaactgcttatggcgataccgcgctctgccgcggcaaaaatgactgacgcggcgacgctgaaggtctttgaattaccgtttgaggttccgccgtttgaagtgaaaatctattcccacaagcggagcgggcagcgcggcgcgagccagtggctgaaagagaggctgagggagtgggccgcgacggaacgaacctgatgtctcgtttgacgagtcagcgatatatgcttaactcatgagacaacaaatgtgaatcgtctgttaacagcctgatgtgcgcttcagtggtaagcgcagcgtcatctatcctgataacgtaagagagaaaaattgaaattagccggactccatcccgatgaactgcgtcgcctgcaatcgctgcgggcatccggattacttaatagcggaaaagaagagcgtttcgatcgcctgacccggcttgcgcgtacgctctacgatctgccggtggcgtcggttagcctcgtgggagaaaataccctgcatgttaaatcctgcgccggacttgaagtcgataccctgccgagggatatcacgttctgcgcgcatactatcctgcagaccgaccctttaatcgttaatgacctgcagcaggatctgcgctttcacgataacccgctggtcacggaagcgccttttatccgcttttatgccggatacccggtacagctgcctgacggcgcgacggtcggcgcgttctgcctgatggaccacaagccgcgcgccttttccgtgcatgagatacaaatattaagcgacctggccgccatcgttgaagatgaattcaaggtgctcgacgcggcgaccgccgatgagctgacggggctgttcaaccgccggggttttatgtcgttagcggagtacgcgctgctgacggccaggcggcgcaatgaaccggcgagcctcgtatttatcgatctcgatcgctttaagctgattaacgatacctggggtcatgaacagggggataaagccctgacggcgatggctgatttgatgaaagccaccttccgggagtcggatatcattgccaggcagggcggagatgagtttattatcctgcttgctaatactgcccagcaggcggcgggcatcgcgatggcgcagctaagcaataacgttgctgagtataatcaacaggcgggcaacccgtggcagctggccttttcctggggctgcgttgaatacgaccctgcaacgcatcatagcctcaatgagatcgttgcggtggcggaccggcgcatgtatcaggcgaagaccagccatggcgccgagcgccggtagggaaccgcccggcgtcgccagccgatattcggcgtctggctgatgccgcggcggcttgcgcttccttagtggagaccaaggcggatcagttcaacgggctcgaacttaccttccgtcccttccacttcgactgtcttattacggcgcagctgggctggcgttaagcccgtcgcgtggatagcgataattttaccggttttacccgtcccgttaatcatcacctggctgccgtttgtaataggattgcggttacgatcgtaagtgatcatgctgatttctccttttaatcatcgggtggtaacaatcgcttctcgcgccgggctgccccggcgcggacgtaataccaatacgcctctcggcccgtcattttgttgtttttgatcaacttcacactttttagcgtccctcaacgggctaacgagccggagacaggctttgcctgacccggaatccgtactgcttttgaagacgattccgcgggtatcaacccccgtggaggcccgggttgcagtcgctgatgcggctgctaaacttttttcgggcataacggagcggaacgatgaagaacaaagaagagcaaacggggctgattggtcttgccattggcgcggcggttattggcctggtctctggccagaagccaatcaaccgggaaagcattgttgaagaactggtgaggctgggcagacagaagggggatggcgtcgaggacgagatttttatgcaggcggcaacgctggtgcgcaagggggtatgatcccgccggtagaagaagcccgggtaggcgaaaacccgggattaaacggggaggaaggtcatcataagatacgctatcacaatgcatatcagcgccatgtaccagacaaaactcattctgttacccgccctgtagcgccatgccggtcaccgcgttaaccacggtcgcggccatcaaaacgccgccgacgatagcgcaggcacggtttttccgggtcgcccccaacgtcaacatcaccaccgctgcggcaaagagggggatggctattatgctgaaagtgttcatcgtttcctcaacactcgtccgttaatcttcctgcatccacatatcggcttcttcgaacatctcctgcacggcgcggctgatctgctccttctcgtgcttgctggcgtcagtattgatggaagccagggtcatcatcggcttaacgcggacgtcggcatcgggaaaaatgcgatgcactcgcttcgtcagttcattaagaatgatctctttagcgccggccaatccctcgaaatttcttttgtcataaatcagctctacgaacattttttatcccgttgatgataatagcagggagtattgtactgtgattatatacagcgtcaaggccgaggtatacgttccccgtattcctgcgccggggataactcgccgcttttgcattaaatgcgtgaaaccgacaattgttttttataagtacgtaaaagttaatgaatttttaataaaaggtgtttatgtcggcgatatcaccgttttattaagggtttctcatgcgcgataaatattctggcctgcaaattggcatccactggctggtgtttcttttagtgataggcgcttacgcggcgatggagctgcggggcttttttccccgcagcgcgcgacccgtcatcaatatgattcacgtctcctgcgggatttctatttttgttctgatggtggtgcgcctgttggtgcgtctcaaatccccggcgccgccaattgtgcctaagccgtcgccgatgatgaccggcttcgcgcatctggggcatctggttatctatctgctgtttatcgcgctgccggccatcggcatggtcatgatgtactaccgcggtaacccgtggttcgcgtttggcctgaccatgccgcacgcggtggaaagcaactttgagctggtggataccctgaaagcgtggcacgagctgctggccaataccggctactttatcattggcctgcacgcgctggcggcgctgttgcaccactacttgtggaaagataacacgctgctgaggatgatgccgcgcaggcgctaaacctcgataaacccgcttcggcgggtttttttgtctctctttactttaattgtgataaaaatgttatcaacaataaaaaagaaggggaagggtatgaaagtcagacatgccatcgcagaagaggctccggccctttgggaggttcgtaatcaggcgattcgccacggttgccgggaaagttatgctgcggaagtcctgcaggcctggacacccgacaacatgcctgaaggttaccgccatgcggtgcgcgataatccgttttttgttgttgatgatgggctgggcaagccagttgccagcggctatctggatatcaaagcgggtagcgttgaagccatatttactttgccgacgtgggagggtaaaggctgcgccagcatgattatggcggccatcatcggagaggcgaaacaacgcaagttcaggcacattaccctcgatgcaacgccaaacgcggccggtttttatctgcgcctgggattcacttcaatcggcgaaaagcgctggcattcgaaaatggcgaacgccgacttacgctgtgaatcgatgatccttagcctcgactaagcgcaaattctcgccgctatgctacggttaaagcggcgaagccatttgcctcatggcaacaataaatatagtatacccccctatatgatatggagggcgtcaccatgccacattcacctgaagataaaaagcgtgccctcagtcgggtaaggcgcatccgtggccaggttgaagcgctcgagcgggcgctggaatccggcgaaccctgtatgaccattctgcaacaaatcgcctcaattcgcggcgccgccaacggcctgatgggagagatggttgaaattcatctgcaggatgaactggtcagcggcgaaacgacgccagaccagcgcgccgccagaatggcggaagtcgggcatctgctacggtcctatttaaaataaaatcaccacgaggaagagagatatgaaatcacgtgcagccgtcgcgtttggcccaggccagccgctttcaatcgttgagattgacgtcgcgccgccgaaaaaaggcgaagtgctggtcaaaatcacccataccggcgtatgccacaccgatgcctttaccctctcaggcgacgatccggaaggcgttttcccggcggtactgggccatgaaggcggcgggattgtcgtcgaagtgggggaaggcgtgaccagcctgcagccgggcgaccacgttattcctctgtataccgccgaatgccgcgagtgtaagttctgtaaatccggcaaaactaacctctgccaggcggtgcgcgccactcagggtaaaggcctgatgccggacggcaccacccgtttctcctacaacggtgaaccgatttatcactatatggggaccagcaccttcagcgaatacaccgtagtggccgaaatttcgctggcaaaagtgaacccgcaggcgccgctggataaagtctgcctgctgggctgcggcgtcactaccggtatcggcgcggtgcacaatacggcgaaagtaaaagagggcgataccgtcgccgtcttcggcctcggcgggatcggcctggcggtgatccagggcgcggtacaggcgaaagccgggcgcattctggcggtggataccaacccggaaaaattcactctcgcgaaagagatgggcgcgaccgactttatcaacccgaatgattacgataagccggttcaggatgtgattgttgaactcaccgacggcggcgtcgactttagcttcgagtgtatcggtaacgtcaacgtgatgcgcgcggcgctggagtgctgccacaaaggctggggcgaaagcgtcatcatcggcgttgccggcgcgggccaggagattaaaacccgcccattccagctggtcaccgggcgcgtctggcgcggctccgcgttcggcggcgtgaaagggcgtacccagctgccgggaatggttgaagaggcgatggcggggaaaattcgcctcgatccgtttattacccaccgtatgccgctggatcaaatcaacgaagcgtttgatctgatgcatgaaggtaaatccattcgtaccgtcattcatttcggcgagaattgattttcctggtgaaaaataacccgggcatgcccgggttatcatttaagagggattactcccgccgcaggttttcataaccattctgccatcgccgctgttctcgccgctcccgttcacgctgaatatccgatttctcatcttcccacaccgcgcagtgcggcccgctgaacacctcgcagggctgtgggttggcggtgagcggagacgccgctttctcttcccaaatcgtcggatcgcgcaggtccacttccggggcttttaacgcctgagccgaggcggcggctaacataaaggtgcctgcgagcaggcggcagggtgaacttttcatccattatccttgttcagttgttattattgataaccattcgcaatagtaacatagctgaatgaaaatggcttgcttaggggggctgaagatgattttgccttcgcgccagccgccaccgggcggttcccgggccgcaaaaagggccccgtttggggccctggcggttacttctgctgcggaagcgcgtaggcgataatataatcgccgcggtccggcgactggcgagcgccgcccgcgttgatgatgatgtactgcttgccggttttcggcgatacgtaggtcatcgggccggactgactgccgaccggcagacgcgatttccagatctctttcccgttggcggtatcaaacgcgcgcaggtagaagtcctgggtgcccgcgaagaacagcaggccggactgggttgataacgaggcgcccagcgtcggcataccgatagggattggcatatgcatgcggatccccagcgggccggtgtcctcaacggtgcccaccggaacctgccacaccagtttgccggttttcaaatcaaccgctgacatagtgccgaacggtggtttctggcacggaatgcccagcggcgacaggaaacgttcgcgcatggcgccgaacggcgtgccctccatcggcacaatccccatttcgataccgctggcgtccttcgccactttggcgcgcggcaccatatagttggcgaggccaaggcgcatatcattgacgaacatcaggctgttgttcgggtcaaccgacacgctgccccagttcatcccgcccagcgagccgggatactgcagcgaacgatcctcgcccggcggggtgaagacgccctggtgacgcatctctttaaactggatgcggcacagcagcaggtcgacaggcgtcgcgccccacatatccgactcggtcagcgtctcgttgccgatcattggcatgccgacggagtagggctgggtcggcgagtagcgctcgcccttgacgttgcccgccgggactggacgttcctcaaccttggcgaccggttcaccggtggcgcggttcagcataaagatcatgccctgcttgctggtttgcaccagcaccggcgtggtgccgcctttaccgtcaggcagatcgtacagcagcggctgggaaggcaggtcgaaatcccagagatcgtgatgggtggtctgataatgccagcgtacctggccggtcgtggcgtcaacggccacgatggaggaactgtatttatcgtccagcgcggtacgttcgccgccaaagaagtccggcgttgcgttaccggtcggcagataaatcagattcagcttcgcgtcataggacatggccgaccagacgttcggcgtaccgcgggtgtaggtctgtccggccggcggttcgccggtcaggttcgggttgcccggatcccatgcccacgccagtttgccggtatgaacatcataggcgcgaacgacgcccgggggctcgccggtggagaagttatccgccacgcgaccgccaaccacgaccacgttacccgccaccagcggcgtggaggtctgctggtagtaacccgctttgatttcccccatgccaacgctcaggtccacaataccgtggtcgccgaaggcgtcgcacagtttaccgttatcggcatcaatagcgatcagacgggcgtcggtggttggcaggaacaggcggcgggagcaggcggccggctgcgcgtcggcggcaggggaagcctgggcctggctctcttcgtaatagcctaagccgcggcagcgctgccagttcggcgcggtggcttttgaatcatagcgccatttctctttaccgctatcgacatccagcgccagcaccttgctgtagggcgtacagacgtaaagcgtatcgccaatttgcagcggcgtattctggtcttccgcgccggagccgttgctctgcgggatatccccggtgtgggcgacccaggcaacctgcagctggtcaacgttctgtttgttaatctggtcgagggcggcgaaacggtcgccgtgggtggtgttgccccagtgcgcccagtttttctgctgctcgcccgcggcgaccggtttaaccggcaccgcctcgctggcgctgaccagcggctgggatttaaacatccagccgaaactgaccaacagtaccaccgccagcaccgctgccaggccaaacgccggcccttttttcgccggctcccgggacagaaacggccagaccagcgcggcaaggaaggccagtacgccgagcgcgaacaggcgcgagaacagcggccagtaggtccagccggcatcgctaatggcccagacgatcgaggcgataaacgctatcgcgtacagtatgataccgccgcgacggctgcggaaaatgagcaccgcggcgataaccatcaccaggcccataatcgcaaaatagaaggtcccgccaacggaggcgagctttgcaccaagaataccgatagccaggccgatgatcagcatcagcccggcgagaagccactgcaggacccgggggaatcctcgcggcgcgttgccagttgccattttttctccttaaccacccctgaacaggcgtgaaccagatgaatcaatttctcaagtgaaggcttttgaatgaagcgatgttgaccttcataaaagcaggttttttactattattgatttcgagtgaaccatttggtgaaatcgtggctatgatagatctgttaaagaaatttacgcaattgttaatgaatgatttcgcactaattgattattgtggtgaatatggtaggtgcgaaaaggaaatcaggcggtcagatctccccgacgcgggtaactgtcggggagagggcgatcagacgggcatcgatttacgaatggcgctcagcagggtttgtgttcccgcggtgagcgtggcgtccactcgggtgagaatacctatcggttcgcccgcgccctgggtgggcaccggcagcgcggccagcagcccacggcgcaggtcgtctttgaccgcaccggaggggacaaaccagacgtagtcgtaatcgacggtgagctggcgcgacagggaagccgacagcgtctcgatgcagccagacggaattttgcagccctggctttgcagcagggtttcggcgttctgtcgcggcagcgtacctttgggcgaaaccaccaccggccactccatgacccgactcagcgtaaccgtttcctgcagcagcggatgccccggacgaaccaccagcttcagggattcgagaaacagcagttcatagttcaacccgctcatcaactccggatcggacatccgtccgataccgatatcgatttctcccgatttgagtccggccagcagcatggtgttattcatggtcgccacctgcagggtgatatctttttgctgctgatggaactggccgatcaccgagggcaggatccccagcgcggcggtggggagcgccccgatgcgcacgatatcgctgttgaggccttctttacggtttagcgcctgtcccgcggtattgagcgcgtcgagcactttaaccgcgtgggtgagaaactgttcgccgaccagcgtgagctgcgcgccgaggcgtccacgctcaaacagccgggtaccggtcagctgctccagttcgtttagcgttttagataaagccggttgactcagatttaaggtttcagccgcacgcccaagagttccctgttgagcgacggccacgaaagtatgtagatggcgcaagcgaatgcgctgactgaaaagaccatttttttgcataatcaatgttaaaaacagaggcgtcccagtgacaagtaagggcgattaaaattgttaacttcatagcaaaatattattaacattttatattattattttacaagttgattttattgagtttgccatatagcgtcgcccctgaccggcaggggcggaaaaaggaagaaaaaactcagatatcgaagaagacggtttcgttttcgccctgcaggtgaatatcgaagcgatatacgatctccgcgccgcggacctcgcgctgcgcgatgagggtctggcgacgcacttcccactcaatcagattcagcaccgggtcgacctggttggcatcctgctcgtcggaaaagtacatccgcgtgttgaggccaatattaatcccgcgggcgaccacccacagattaacgtgcggcgccatggtgcgcccatcgcgacctaccacggccccgggtttaatggtttcgaagcgccagacgccgctggtgaagtccgagcagctgcgtccccagccgcgaaacgccgcatccagcttcttgccctgctgtcggtcgtcgggatggttatagcgcccggcggcgttggcctgccagatttccagcagcacatcgcgcaccggcgtgccggagccgtcgatgactctgccttcgatagtaatgcgttcgccctcggtgtctgccgttgtcagcgtcgggccaaaatttttctcaaagatatggaaaccggcggcgtccggcgcgaggccgatatgcacataagggccggcggtttgtgacgcggtttcaggtaaataatctttcatcgggcggccccctgcgtgcggttttcaaacagcgttgcgcgatggccgcgcaatacgagatcaaaacggtaagccagagagtccagcggtacggctgcatgggtatccagctcggcgattaatgtcctgatggcatcatcgttattgatggttttgacaataggacactgtttaatcagcggatcgccttcgaaatacatctgcgtgatcagacgctgtgcccaggcgtcgccggagagcgaaaagtgaatatgcgccggacgccagtcgcttacctggttgcgccacggataggggccgggcttgatggtgcggaaacaatagtagccgttttcgtctgtcagcacccgtccgcagccgccaaagttcgggtcgataggcgccaggtattgatctttcttatgccggtagcgtccgcccgcgttggcctgccagacttcgaccagcgtatttttcattggtcggccaaatccatcgcgaacgtagccgtggacgattatcctttcgccaatcggcaggccgtctttggcgtagttgaggatcaggtcgttatcgagcgcgccgagatcgtcgctgctgaacaccggtccggtgatttcagaaagggaattctgcagggaaatgagcgcattgcgcggcgagcgcagcacgctggttttatagcccggggcgtaagcgggaggatggctgctgtagtcgcggtgcaggacctcgcgcggtgaccatttgtcgttcatgagggtactccatattatcggtagagaggcatgttgttgtaatgtcgccactcgcagtgtgtgtaaatgttttgttaatttaaagtgaaattaaagggtgtttaacataaccggcggttatgaagtgagcggttgaaaataaaccggccagctaccggcatcacagtttgtaaattcttcccgccgtctgcagagagctttcctacactccagggagaattcactggaggtaagacatcatggcgaacaccatcacggctgatgagattcgggaaagcttttcgcaggcgatgtcggcgatgtaccagcaggaagttccgcagtacgggacgctactggagctggtggccgacgttaacctggccatactggagaataacccgacgctgcacgaacaactggccaacgccgatgaactggcgcggctgaacgttgaacgccacggcgcgatccgcgtcggtacggcggaggaactggcgaccttgcgtcgcatgtttgccattatgggaatgtatcccgtcagctattacgatctgtcgcaggccggcgtaccggttcactccaccgcgtttcgccccattgatgacgccgcgctggcgcgcaatccgtttcgcgtttttacctcgcttctgcgacttgaacttatcgccaatgaagctttgcgtcagcgggcggcggatatcctttcccgacgcgatatcttcacgccgcgctgtcgtgaactgatcgcgttacatgaacagaaaggggagtttaccgccgcagaggcccgcgagtttgtgcaacaggcgctggaaacctttcgctggcatcgacacgccaccgtcgatgaggaaacctatcacgcgctgcatgaagagcaccggctgattgccgatgtggtctgtttccccggctgccacattaatcatctgacgccgcgcaccctggatattgaccgggtacaggcgttaatgcccgagtgcggtatcgcgccaaaagcgttgatagaagggccgccgcgccgcgatgtgcccattttactgcgccagaccagctttaaggcccttgaggagccggtgatgtttgccggagagcatagaggcacgcatacggctcgctttggcgaaatcgagcagcgcggcatcgccttaacgccgaagggccgcgccctgtacgaccgactgcttggcgaggcgggggtgggcaaagataatctcacccatcagcgtcatctgcaggaggtgtttagcccattcccggacagcgaattcctgctgcgtcagcaggggctggcgtactttcgctatcgcctgacgcccgccggcgaagcgcaccgtcaggcgtttcgtccgggcgacgatccgcagccgctgattgaacgcggctgggtcatcgcacaaccgattatctatgaagactttttgccggtcagcgccgccgggatttttcagtctaacctgggcaacgagatacagacccgcagccacggcaacgccagccgccaggcctttgaggaggcgctgggctgtccggtctatgatgagtttgccctttatcaacaggcggaggagcgcagtaaacgacgttgcggtctgctgtaaaatcagtactctgctggcatgagttgttaaaggaagcaggccatgcagaatccgtctaccccgctggtgaaaacccggcagggcaccctatccggcaccgctgaagagaacatgcatatctggcgcggtataccctatgccgcgccgcccgtcggcgatctccgctggcgcgcgccgcagcctgccgcccgctggcagggcgtgcgccgggcggagagtttctcagcctccagctggcaggatattgagtactgtcgtgagctcggcggcggcgatcccggccgcttttccgaggattgcctgtaccttaacgtctggtcgcccgcttcgcgcgcgcagccgctgccggtgatggtctggctgcacggcggcggctataccatcggcgcgggaagcttaccgccctatgacggtaaagccttagcgtcccgtgacgtggtggtggtgacggttaactaccggctggggcatctgggcttttttgcccatccggcgctggaggaagaagagggggagcgcatctataatttcgcgctgctcgatcagatcgccgccctgcagtgggttcaggagaacatacacgccttcggcggcgatgcggccaacgtgacgctgttcggcgagtccgccggggcgcgcagcgtgctgtcgctcatggtttcgccaaaatccagagggctgttccataaggcgattattcagagcggctataccttgccggatctgccgcgggaaaaggcgctggccaaagggcagctcatcgcggagcacttctctttaccgcaggccagcgccgaacagctgcgggcgattccggcggacgcgttctggtcgctgaccgcaccgcttaccatcggcccggcgcccattgttggcgatgccgtactgccgcagccgatgctggagactttttttagcgggcgtcagcacccgctgccggtgatgattggctcgaacagcgatgaggccagcgtcatggcggtgtttggcgtcgatatcgccgggcagatccagaagcttcgccgcgaacgccgttttggtctcggtttgattaagctgctctatcccggcgtcaagggcgatgaggcattagggcgtgaagtctgccgcgatatggcctttaccaccctgggttacgtggtgatgcaggcgcagcagcgggtagggcaaccgtgctggcgctactggtttgactacgttgccgaggcggaacaccaaacctatccgcacggcgcgtggcacggtaatgaagtggcgtacgtttttgacaatctggaccttgccgagccggtgcgacagtatgcgaacgatcgcgaccggacctttgccgcccgggttgccgactattgggctagctttgcccgtgtagcgggtaacggctgccacgagctctccgggccggtgcgctggcccgccagcgtgcgcggacgggaccgtctgttgcgcatcggtttgcacaagcgggccggttttaaagtggaaaaccgctttatgcgcgcgcgtctggcgctgtttcggcgggtgatgaagcaccatgtgacgctggattaacgctgtccggaagatctccgtctgccgcgggacgtttttaaccttctgcagcaaaaataatcgcctgcgcggccaacgttcgtctggccgcttcctgttttgctttgccgccgcggtatttagcatgaaacgccgccggttggtgaaatcatcgccgccccccggatatcggtaattcggtctggtccggtggacatatttttttcacgcatttctgccgtcaacaattggattatcaatcatttttgtctagagtgagcgacattcacgacgcatgggtttgttacgtcgcgtctcaattcacatatgaagaaggatgctctctcaggcatgaaccgcagacgttttctcaaatcttccatggctgttgccgccgtatgcggaacgtcaggagttgcctctctattctcgaaagcggccttcgccgaggactcgggaattgccgacggccagacccgtcgctttgactattccgtacttcagtcgatggcccacgatcttgcgcgtcagccctggggcggcgcgccgcgcgatctgccgccaaccctggcaaacctgaccccgcaggcctacaacagcattcagtatgatgctgcgcactccctgtggagtaatatcgaagagcgcaagctggatattcagttcttccacgtcgggatggggttccgccgccgcgtacggatgttctccctggattcacaaacccagcaggcgcgggaaattcacttccgtcccgagctgtttaaatataatgacgccggcgtcgacaccaaacagctggaaggccagagcgatctcggctttgccgggttccgcgtgtttaaggcgccggagctggcgcgccgcgatatcgtcgccttcctcggcgcgagctacttccgcgcggtagacagcacttatcaatacggactctccgcccgcggcctggcgatcgatacctttaccgatacgccggaagagttcccggacttcacctctttctggtttgagaccgtgaaaccgggggcaacggtatttaccgtctatgcgctgctcgacagcccaagcgtcaccggcgcctataagttcgtggttaactgtcaggagacgcaggtgattatggatgtggaaaaccacatctacgcgcgtaaagacatcaaacagctgggcatcgcgccgatgaccagtatgttcagctgcggcaataacgaacggcggatgtgcgacactatccatccgcagatccacgactccgaccgcctgtcgatgtggctgggcaacggcgagtgggtgtgccgcccgctgaacaacccgcagaagctgcagttcaacgctttccaggataaaaatccgcgcggttttggcctgctgcagctggatcgcgacttctcccactatcaggacatcatgggctggtataacaaacgcccgagcctgtgggtggagccgcgcaaccagtggggtaaaggggccgtcaacctgatggagatcccgacgaccggtgaaacgctggacaatatcgtttgcttctggcagcccgagaagccggtgaaagccggggatgagctggacttccgctatcgactctactggagcgcgcagccgccggtccgttcgccgctggcgcgggtattggccacgcgtaccggaatgggcggtttcccggaaggctgggcgccgggtgagcactacccggataaatggacccgtcgttttgctatcgattttgtcggcggcgacctgaaggccgcggcgccaagaggcattgagccggtgattaccctgtcgagcggcgaagcgaagcagatagaaattctctacgtggaaccgtttgatggctatcgcatccagtttgactggtacccgacctcggattcgaccgacccggtcgaaatgcgcatgttcctgcgctgccagggggaagcgatcagcgaaacctggctctatcagtacttcccgccagcgccagacaagcgtaactatgttgacgatcgggtaatgaaataattgccctttattccgcccgctaaggtcacttagcgggcgtttgttttttaatcagactattaaatcagagtccattatgactgacgaaaacgcgcctgcgagagaaactatccccgtcaccgagtcgctttctctgcgcgctgtggatgaaagccacgtcgctgagctgcatcagctggtgatcaagaaccagcgctggctccagcaatcgctgagctggcccgctgaagttagtcacgaagacgaaacccgccgccacgtgcagggcaacgtgatgctgcaccagcgcggttacgccaaaatgtttttgctctttctgcgagaagagatcgtcggcgtgctgtcgtttaaccagattgagccgatcaataagaccgcatacatcggctactggattgatgaaagccaccaggggcaggggctgctttctcaggcgctgcaggcgctgatggacgcttttgcccgcagtgggacggttcgccgcttcgtgattaaatgtcgggtagcaaaccagagaagcaatcaggtcgccctgcgtaacggtttcaccctcgaagggtgcctgaagcaggccgagtatctgaacggttcgtacgatgaccagaatatctacgggcgcattattgattgtgacaccgggcaattcccggctcgcggctgacgccttgcccgggctacgggccgcgctgagatgtagcccgggcaaggcgcgttgagcgccgccccccggggaacagcgcgcaggggcctgaagctgataaaccacgcggtcgggagcaaaggttatagaaagccgacaatgggcgtgcgggtaaaaagttcgtcgccgtttatcactttctcccctctgatagaaatggcgtctcccgcgctggcttcaattcgcgctctgtcgccgatcgtcacctgatgttcaatcaccacatcgccgcaaatgaccgcatggccttcaattaacacgctatcgtccagcagaatcggcccgccgagcaggtgcgcatgcccaccgaccatcacccgatgcttcagcaggcagttgccttcgaccaccgcgtgctccgccacctgcgagctgtagcgtagggtggggatggcgtcttcttcccgtccggcggtaatcctcgcgtgaccataaacgcgcgcgttatcgcagacccagacgtcgttctcttcattaccttccagccgcgcatgatcgaaaatttccgcccggtgctcgacaaaagcgtgttcgacaaacgcatcgccgtaaatttgtgcctggtgaacgacgcgcgatgcgctgaccgttgcccgctgataaatgcgcaggattttatcgttgtcggcagtcagaccttgagcggcaataattaaacagtgggggaggatctgcgcattgtcggccaggtggcagcatccgcgaatctgcgaatgcgaaacggtgacgttgtcacttattcgcgcgcagtggcttgcctgcacgctgtccagtcgcgcgttatcgctgacgatggcgccatggctgataatgcactcgccggttaagcgggcattgccctcgattttcgcaccggcaaacaccgcgctattcgggtcataaatccagcactcgccttcgtggctcagggctgcttcattgtccagccagccgccttcatcgccgcttttcacgtcagcgaaatcgcgtaaggcgacaatttgccgcagattgacgctatgtttatttccgtcggcttcatagtgaaactggcgaaccttctcgctgaggtaatatttgcgcatctgcctttctcattacatatggttaacataaacatagcaaaaaacgccgtagcgtgtttttgaaggttcctttagaatgcaacttaagataaattgaaaatttaaacaaaatgaataaagagcagcgcgtgagccgggtgctgaatctcccggcgggctattttggtatggttctgggcattatcggcatgggcttcgcctggcgctacgccagcacgatctggccggtgagccggacaatcggcgacggtctggttatcgtggccaccctcgtctgggcgctgctggcgctggcgtttatcagccgtgcagtccgtttcccgcacagcgtactgcaggagatgcgccatccggtggccagcagttttgtcagcctgtttccggcgacgaccatgctggtggccatcggctttgttccctggctgcggccgctctcgctggtgttattcgcgattggcgtagtgctgcagctaagctatgcggcctggcagagcgccgggctatggcaggggaagcatcccaatgaggcgaccaccccgggcctctatctgccgacggtggcgaataactttatcagcgccatggcctgcggcgcgctgggctttaccgacgccggactggtgtttcttggcgccggcttattctcctggcttagccttgaaccggtgattctgcagcgcctgcgcagcgacggcgaactgccgatggccatgcgcaccgccctcggcattcagctggcgccggcgctggtggcgtgcagcgcctggctgagcgtgaacggcggcgaggcggataccttcgctaagctgctgttcggctatggtctgctgcagctgctgttcatgctgcgcctgatgccgtggtacctgcgtcagccgtttaacgcctcgttctggagcttctcgttcggcatctccgcgctggcgaccaccggcctgcatctcggtcatcagcatccggacggctttttccatacccttgcgctcccgctgtttctcttcaccaatctgatcgtcgggctgctgctgattcgtaccttcctgctgctgatgcgcggtaaactgctgattcgcgttgagcgcgacacattattaaaaaataaggattaaccatgacgcttcgtgacgaaaattacttcaccgataaatacgggatgacccgcacccactccgaggtgctgcacgccgccaccctgatcgcgccgggcaaggcgctggatctgggctgcggcaacgggcgcaatagcctctacctcgcggccaacgggtttgatgtcaccgcgtgggataaaaatccggccagcatcggcaatcttgagcgcattcgtcaggcggaagggctggagaatctgcggacggcgattaaggaccttaacgccctcagctttgacggcgagtatgactttattctttcgaccgtggtgatgatgttcctcgacgcgaagaccatcccgggtctgattgctaacatgcagcgctgcaccagacccggcggctacaatctgatcgttgcggctatggataccgacgattatccgtgcagcgtcggcttcccgttcgcgtttaaaccgggagagctgcgcaataattatgaaggctggacgttactcaaatataacgaagacgtcggtgaactccaccgcaccgacgccagcgggaaccggattaagctgcgtttcgccacgatgctggcgcgcaaaccggcttaacgcgccgctaacaggcagagctgtaatgcggtctgataagaggcctcaaaggcgcgcagcggcagaaactcaaatttcgagtggaagttgtgcgcgccggtaaagaagttgggcgttaatacgccttttgccgacagggccgcgccgtcggtgccgccgcgcatcggcgtcggtttcggcgtaatgcctaagctttccatcgcttcgaacatcagatcaacggcgcggcggtcttcgccgatggcattgctgatgttgctataggtatcgctgatgtgaaattccacctttccggtcggatactgcgcggcgattttctgcgccacctcgctaatttgctgcttacggcgatgaaaactttcgaggtcgaaatcgcgaatgctggcctgcagcagggtgctgttctgatcgccctggataccgttaaaccaaacgtagccctcgcgtccggcggtatgctccggcgtttgctggcgatcgaaatggctcatgtaatcggtggccatcagcagcgggttcaccagcacgccctttgatgacatggggtgagcggtcacgccggtaaagcgaatctccgccgcggcggcgttaaagttttcatagacgatttcgccgagctcgcagcagtcgatggtccaggcaaaatcgacggcaaagcgcgcgagatccagcgccttcgcgccgcgcaggcccacttcttcatccggcacaaacgcgaccacgatgtcgccgtggcggtgttccgccgtcaggttttccagcaccgtcatcaccaccgtaacggcggacttgttatccgccccgagcacgctggtgccgtcgctgaaaataatctcttcattgggataagcgaggatttccggatgttccgcaacgcgcagccagatatctttatccctgttcaaacagagatcttcaccagtaaaacgcagaatttgtggatgaatatccggcgacaaaccgacgtcaacggtatcgatgtgggtaataaagccaatccgcggcgcgcctgcgacgttgccttttttcaccgccgtgacggtggcgtgctcgtcaatcacaatctcatccagccccagctggcgtagctcatccgcaagggcctgcgccatcgcgtgttgcccggcggtggtaggcagcgtcgtggctcgcgggtcgctttggctggttatcgccaggtagcgaaagaagcgttgggttaattgactggccagggctgatgacatagtgattccttctttattcgagttttcaggtgtttgcaatcaggctttagtgttatgtatgaaagggaaaacaacaagctattcattagctgacaaattaaaaaggaaaacctatgcaacgcagattcacgacgcttgctctggcgttagcggccctgacggccagctcggccattagcgcaaaaacgctggtctactgttcagaaggatcgccggaaaactttaacccgcaactctacacctccgggaccagcgtggacgccagcgcggtgccggtctataaccgactggtcgatttcaaagccggcaccacagaactggtgccgagcctcgccgaaagctgggaagtcagcgaagatgggaaagtttatacttttcatttacgcaaaggcgttaaattccagagtaataaatattttaaacccagccgcgattttaatgccgacgacgttattttttcgtttatgcggcaaaaagatcctcaccatccttatcataatatctccagcggcaattactccaattttgaaagcctcgaatttggccagttaattaccgcgattgataagcctgatgaatatacggtgcgtttcacgctggcccatgccgaagcgccctttgtggccgatcttgcctggtatttcgcttctattttatcggcggaatatgccgatgcgatgctaaaagccggcacgccagagcgcgtggatatggacccgattggtaccggacctttcaaactcgcgcaatatcaaaaagattcccgaattcttttcaccgcgttcccggaatactggcaggggaaggcgcatatcgatcgtctcatttttagtatcacgccggacgcctcggtgcgctacgccaaactggagaaaaacgagtgccaggtgatgccgttccccaatccggccgacctgccgcgaatgaaagagaacaacgcgatcaacctgatgagcaaagcgggccttaacaccggtttcctggcgtttaacacccaaaaagcgccgctggacaacgttaaggtgcgtcaggccttagcgatggcgatcaataaaccggcgatcattgaagcggtgttccacggtaccggtacggcggcgaaaaacctgctgccgccgggcgtatggagcgcggatagccagctgaaggattatgactacgacccgcagaaagccaaagcgctgctggcggaatcgggggttgcggggccaattaccatcgatctgtgggcgatgccggtgcagcgaccctataacccgaacgccaaacgcatggccgaaatgatccaggccgactgggcgaaaattggcgtgcaaacgaaaatcacaacctatgagtggggtgaatacttaaagcgggtgaaggatggcgaacatcaggcggcgctgatgggctggacgaccgcgaccggcgacccggataacttcttcggcccactctttacctgccagtcggcgaacggcgggtcaaactcggcaaaatggtgctatcagccgtttgataaaattatcgccgaggcaaaatcgataaccgatcgccaaaaacgcgaagcgctctatcgccaggcgcagcagatgatgcatgaccagatgccggcagtcatgattgcccactcgacaatatttgaaccggtgcgtaaaaacgtgtcaggctacgaaatagacccctttggcaagcatattttttatcaggttgatatcagataaacagccaatcacggcccgccggcaacggcgggtttattttttccagctacttgacgtagcaccgcttttgccacaaaacttacccctgttatttgctataactcttgccgataaatggtattcacagggattaacctatatgcgtactccgttattttttaaagtcgctgcgcttgctggcctgttagcattggccggttgctcatccaaaatcgctaagccggaacaatattcgggatttttaaaagattactctaacttaaaagaaaccacctcggcgtccggcaaaccggaactgcgctggatttcgccggattacaatccgagcaactatgacaatatcgtctataacccgatcacctattacccggtaccaaaacccaccacccaggtgggcgagaaggcgctcagggatatcctgaattacaccaataaagagatgaaacaggctatttccgagcgtaaaccgctggcaaccaccccgggcaagcgcagcctgatcttccgcggcgccatcaccggcgtggattccagcaaagaagggctgcagttctacgaagtgattccggtggcgatgattatcgccggtacgcaggcggcaacgggccaccgtaccatggacaccaacctgttttttgaaggggagctgattgatgcggcgaccaaaaagccggttatcaaagtggtccgtaagggcgaaggtaaaaacctgtccaacgaaaatacgccgctcaccgtcgagaccctgaagcaggtcattgatgatatggcgattgacgcggtgaaattcgaccccaataaccgttaatcaggcgtatccgttaatcaaggcgctagtggttgatagcgcctttttcatttcccctcgacggtagcgcgagcgtcagcagcgatccgagcgaacccaggccagcctgcgccgcagcagccactgctccgggcgagcgaacattaccagatttccgaccaggatcagcgccagtccggccacggcgctactgtgccagacgtaaccttcataaaaagtcgaaatagtcagcgcgacgagtggaaacagcagggtgctgtatgccgctttacccgcgccgattcgccccaccagcgtaaaataggcgccaaaggcaatcaccgagccaaacacggcgagatacagtagcgcgcccatatagctgagggtccactgcggcgcgaaattatcaccgcgaaccagcgcgatcgcgcccatgaccagggtgccgtaaagcatggcccagctgttggtggtcaacgtctccagaccgcggcgctggtggcggatgctgagcatattgccgagcgaaaatccaaaggtgcccaatgcgctgagggcaatacccagcaggagcgaggcgttcaggccgctggcccataaatcatcccagaatagcgtcacgatccccgccagccccagcgcggcggccagccagaaacggcccggaggctgctggcgatagaagagaaagctattgatcgcgttaaacaacaccgccatggagaagatcaccgactccagcccggtattgatatacgcggcggcggtatagaaacaccagaaattaaagcagaaaacgcagcagccctgtagcaggcaaaagagatggtcgcgcgcggccagcgggcgcaggcggcgggtaaccagcagaatggtcaacatcgcgacgctggcgacggcgaagcgccagaaaatagacaccggcgcggcaaccggcccctgctgcaaaaagatagcaatccaggtggtgccccagataaccacgaccaacccgtagagtaatgcgttcaaaatgtctctcctgtgagtgttgtaccggtcattgtgcggcctgggcgaattcggcgctgtcatcagcttgtcgccgacttgcaaattcttgcgcttatttttcattagcggcgggggaatgctggtatctgccggcgactcttcttagactagcgatctgcggaatctgaactgtgaaggctatggcttacgggactttcgaaacattgcgtcaaaaaaatgccgtgctgcgggggacggtgaacctcaactccggtattcagctggcggcgtggtataacaatcttgataccatcacggtacaaagcgaccaccataccctgagcctctatattgccgatggctacgaaagctaccaaaaaaccccccacggctggaaaaacggcggcgggccggatcgtttttgcctgatgccgaaaggcgatgagagcacctgggatatccgcggcgatctctcttttgtgcatctttactgcaccgatgaacacctgcgccgggtaggcgagcagatttgggaccgcagcccggcctcgttcacgctgcaggagaaaacgttttccagcgatgacaaaatcaccgccgtctaccgccagtttctcctcgacaacgactggcagcagcaggcgaatcagctgacgttgagttcggccagcacgctgctgctcacccacctgattcagcactattcgaacgttcagtggcgtttaccgaccgtgaccggcgggctggcgccgcacgtcttgcgcaatctgctggcatggattgaggagaacctcgaccagccgctcactcttgccgatctggcgcaggaagcggcgttaagcgaataccattttgcgcggatgtttcgccagtcgatgaagatggcgccgcatcagtacgttatgcagcgccggatggttaaagcgcaggcgctgattagccagagtcggctgccgttaaccgatatcgccatggcctgcggttttagcagcgccagccacttcagcaaccgggtgaaaagcgccaccggcctgacgccctcgcagctacgcgcggcgcagcgttgacagcaaaacgtagctgacgccgccgagaaccagcccccaaaacgctgagccgataccggccagcgtcacgccgctggcggtgaccagaaacgttactaccgccgcatcgcgctcactctcatgattcaatgcctgaaacaggctgccgccgatggtaccgagcagcgccagcccggcaagcatctggacccacgctatcggcagcgccgacatcaacgaggtgattgagccgccaaatatccccgccagcagataaaacacgcccgccgccgccgccgcgagccagcgtttttgcgggtccggatgggcttccgggctctggcaaatcgcggccgtaatggcggcgatgcagatcgagtagaccccgaaaggcgacagcagcagcgccaggccgccggtggcgacaataagcgttgaagcggggacccgatagcccgaggcctggagggtggcgaagccgggggcgttttgcgacgccatggtgacgaggaaaaacggtataccgacgctgatcaacagcgctggcgtaaattcaggggcgatccaggaaggggcgacaacgctgaagcttatttgtgacgttgtcacttctccgctcaatccggccaccgcgcttcctgtcagcagggcggcgacaaccgcgaagcggggaagccaggctttgcacagtaaccatacggctaacatactgccgcataacagcagattagcctgcaggctggcgaaagcctgcatgccaaagcgcagcaatatgccggccagcatcgccgccgccagcgaatggggaataatcttcatcagccgggcaaatatgccagtgatgccgcaaagcacgattaaggcattggcaaaaataaagacgccaaccgcctgggagagcgtgaccccctgcaggccgctgaccagcagcgccgcgccgggcgttgaccaggccgtcaggatgggcacctttcgccatacggtgagggccagggtgctgatgcccattcccagacctaaggcggtcatccagccggcgatttgcgcagcatcggcgcctgccgccgccgctgcctgccagataatggcggcagagctggcatagccgaccagcacggcgacgaagccggcgagcagactcggaaaagggagagtgaaagagcgcatgggagtgccttgtgcgttataacggtcggtataatgtagcattgtgcgttatagcgcacaactggcttttcggcaacgccagacccggatagcggagcccgggcgagcgctattcgtcaattccctgtagaatcaggtgaatgtgcgtataattccttcagatattattgggaggttgaatggatattgcgcaacacctgtcggcaacgttaaaaacgctgcgccagcagcgcggctggagcctgtcgcgcctggcggaagagaccggcgtgtcgaaggccatgctgggccagattgaacgcaacgaatccagcccgacggtagcgacgttatggaaaatcgccaccgggcttaacgtgccgttttccgcctttatcgttgccgatgaggccggtgaaccgacggcatttgatccccagcagcaggccatggtggtcacgccgctattcccttgggacccggtgctgcgcttcgatcacttctccatcaccctggccccgggcgcgctgagtgagtcaacgccgcatgagcaaggggttatcgaacatgtggtggtgattagcggcgtgctggatctttgcctgcaggacagctggcaatcgctgcagccaggggaagggcggcgtttcgccggcgatttagcgcacgcctatcgcaatagcggtgggcagactgcccattttcattcgctgatccactacccgaaataaaaaagccgcgagtaaactcgcggccaggcaaatgactgagacaacaaatcacaacgtgacgaggaaaatccggaatacgtgatgactctatcctcaggcactttttctgggaaatatcttttccttcaatgctttgctaaaaactgcaaattccttccgcggcggcgatggaaaatgttttggtctgcgccaggttctgactacaatagccgccatttcgaccccctataatggataacgacgagcgtatgcgcctgcaaaaccatcatcttgaactactgagtcctgcccgcgatgccgggatcgcccgtgaagcgattttacacggcgcggatgcggtctacatcggcgggccgggctttggcgcgcgccacaacgccagcaacagcctgagcgatatcgccggtctggtaccgtttgcccatcgctacggcgcgaaagtgttcgtgaccctgaacaccattcttcatgatgatgagctggaaccggcgcagcgcctgataaccgacctgtatgaaaccggcgtcgacgcgctgattgtccaggatatgggggtcatggagctggatattccgccgattgagctgcacgccagcacccagtgcgatatccgcagcgttgagaaagcgaaatttctctccgacgtcggcttcagccaaatcgtgctcgcccgcgagctgaatcttcagcagatcaaagcgatttacgataacaccgacgcgaccattgagttcttcatccacggcgcgctgtgcgtggcctattccggccagtgcaatatttcccatgctcagaccgggcgcagcgccaaccgcggcgactgctcgcaggcctgccgtctgccctataccctgaaagatgaccagggccgcgtggtggcgtatgaaaagcacctgctgtcgatgaaagacaacgatcagaccgccaacctggccgcgctgatcgatgccggggttcgttccttcaagattgaaggccgctacaaagatatgagctatgtgaagaacatcaccgcgcactatcgccagatgctcgacgccattattgacgatcgcggcgacctggcccgcgcctcggcggggcgtaccgaacacttctttgttccgtcaacggataagaccttccatcgcggcagcaccgactattttgtcaacacgcgcaaaggtgatattggcgcgtttgactcgccaaagtttattggtctgccggtgggggaagtcctgaaagtcggtaaagactttctcgacgttgaggtgagcgaaatgctgaccaacggcgacggcctcaacgtgatgatcaaacgtgaaatcgtcggctttcgcgccaacacggtggaaaaaaccggcgaaaaccgctatcgcgtatggccgaacgagatgcccgcggatttacacaaagtgcgtccgcaccagccgttaaaccgcaacctcgatcataactggcagcaggcgctgctgaaaacctccagcgagcgccgcatcgccgtcgatatcgaactgagcggctggcaggagcagctggtcctgacgatgaccagcgaagagggcgtgagcgtcacccacacgctggacggcgagtttgccgaggcgacccaggcggagaaagcgctggcgaacctgcgcgatggcgtggcgaagctcggccagaccctttactattcgcgcaacgttgagattaacctgcccggcgcgctgttcgtgccaaacagcctgctgaaccagctgcgccgtgaaacagcggaaatgcttgatgatgcgcgtctgaaggccgtggtgcgcggcagccgcaagccggtttcggtgccgccgccggtctatccggaaacgcatctgtcgtttctggctaacgtctacaaccacaaagcgcgcgagttttatcaacgctacggcgtgcagctgatcgacgccgcctatgaagctcatgaagagaagggcgacgtgccggtcatgattaccaagcactgcctgcgctttgccttcaacctgtgtccgaaacaggccaaaggttcgattaaaagctggaaagcgacgccaatgcagctgatccacggcgatgaagtgctgacgctgaaatttgactgccgcccatgcgaaatgcacgtggtcggtaagataaaaaaccatatcctgaaaatgccgctgccgggcagcatcgtggcgtccgtgagtcccgatgagctgatgaaaaccctaccgaaacgcaagggcgcctgataacgaaatcgctactggtagtgatgcatttttggtttccgcgcattctgccagtggtgctgctcgcgcaggtcggaggcggcgtcttccgcctggctgcgcagctcgtcgctatcggcttcgtgctgtaactgctgttcgagactctgtaccgggaagaaatcgtgtccgtgctggcgggccagcacgtgcccggaaaacagggcgcacgccagcagtaatgttgaaatgcttcttctgaacatctctttttccatgctatcggcgaatgaggctactatgccaggggctgggtgagcttattacgtcggttgtcaaagaagagaaaaggctttgtcagcatcgcctgacggatggcgaaaaaaagcccgatggtgtcgccatcgggccgaataacataacgtgacgggcggatcaggccttcagcccggcggccgtcatcagcagccgaaatcccatgcttaccgccgccagcgccagcacgctgcctccccacaggaccatcatccataacgtgcgcttaagccatactcgttgcatcagtgatacccctcgccgtgttgaactttgccgcgaaaaacgtagtagctccagaaggtgtagccgaggatcaccggcagaataagcagcgcgccaaccagcataaagccctggctttgcggcggcgcggcggcctgccagagggtgatgcccggtggaataatatacggccagatactgattcccagcccgctaaagccgagaaagatcagccccagcgtgaggacaaacggcagcaggtggctggtgctgttgcgcagcgctcgccacagccaggcgcttatcgccgcgaccagcagcggtaccggcagcaggaagaagagatttggcaagctaaaccagcgctcggcgatggccgtctgcgccagcggggtccagatgctgatggcgacaattaccgccagcagcgccagcagcaaaccgcgcgcggtcacgcgcatattgcggtggagcgcattctcgctcttcatcaccagccagctggcgcccagcagcgcatacgcaatgcacagtcccaggccgcagaacagggtaaacggcgtaaaccagtcaaacaccccgccgctgaaactgcggccgctgaccgcgaagccgttgatcaccgcgccgacaaccatcccctgggtgaaggtggccagaatcgaaccgcccataaaggcgcgatcccagaacgggcggtgcgatggcgtcgcgttaaagcggaattcaaaagcgacgccgcggaaaataagcccgatcagcatcagggtgagggggatcgccagcgcatcgataattaccgcataggccagtggaaaagcgccaaacagccccgcgccgccgagcaccagccaggtctcgttgccatcccagaccggcgcgacgctgttcaccatgacgtcgcgatccgccgcgtcccgcgtggtactgaataaaatgccaatgcccaggtcgaagccgtccatcacgatatacatcagggtggcgaagacgatgatgacaaaccaaataaccgataaatcgatacccattaccaggactccttctgctgtacatggtccgttgcggcggaaagcgggcgggcaggcgtaccggcgccaggcggctgagcgtcctgcggccctttgcgaatcagacgcagcatatagctataaccgacgccgaataccgaagcgtagacgacgataaacgtcagcagactgatggacatatgcaggtcaccgtgagcggagacggcatctgcggtacgctgtacgccgtagacgacccacggctggcggcccacctcggtggtcacccagcccgcgaggatagcgataagccccgatggccccatccatagcgcaaagcgtaaaaagggtcgggagtgatagaggcgaccgcgatagcgcagccacagggccagcgcgccgagcaggatcatcagcatgccgaggccggccatcagacggaaggaccagaacacgatggtggcgttagggcgatcttccgccgcgaactctttcagcgcgggaacctgtttatccaggctgtgggtgaggatcaggctgccgagggccgggatttccagaccatagcgcgtccgttcctgctgcatatccggccagccgaacagcagcagcggggtgggttctccggggatattctcccagtgaccctcgatagcggcgattttcgccggctggtgcttgagcgtattcagcccgtgcatatcgccaatcatggcctgaaccggggcgacaatcagcgtcatccacagggccatggagaacatcgcgcgaacggcgggcgtgttgtttccgcgcagcaggtgccaggctgccgatgcgccgacgaacagcgcgctgctgagaaaggccgccaccgacatatgcagcaggcggtagggaaacgacgggttaaagataaccgcgaaccagtccaccggcaccacctggccattgacgatctcaaacccctgcggcgtttgcatccagctattggacgcgaggatccagaaagtggagattatcgtccccagcgccaccatgcaggtggcgaagaagtgcaggcccggcccgacgcggttccagccgaacagcatgacgccgaggaatccggcttcaaggaagaaggcggtcagaacttcgtaggtcagcagcgggccggtaatgctcccggcaaactcggagaatccgctccagttggtaccaaactggtaggccatgaccagacctgagaccacccccatgccgaagttgacggcgaagattttcgaccagaagtggtagagcgagcgccaggtcgggtttttggtttttaaccataagccttcgagaaccgccaggtagctggctaacccgatggtgatggcggggaagatgatatgaaatgacacggtgaaggcgaactggatccgcgccaggtggaatgcatcaagaccgaacatgcaaaactccgcaataaaattgattcagcgcaattctaggcctccaccatggcggatagcaggaacagaaaccctgtttttatctataacagttgtcgatttgagcttctgttttttgtgataaatcctatttttctaaaatcaagctatttcacacccgcagatagtatgttattttaatttgacgttagcgctgcaagccagtaattaaacgttcctttgggtaagcgatgtttatattttaaatttaagtataaatatcctgaataattcataagttgtgtatcaatcctataataaaataattgaccgtttttaccgcgcgcacgtacgccttcattaacgctggtttcgtgtgctgtggattttaatctgggattttaactcagcgtgatttgagcgctgagttaaggatatgtttaatacatacccgtaatcttatgggttgttattggatagtgtatttattgattatattttacagaggatgtgattgtgtcgactaatggacttcgtagtttgtgtactgttttgttaattatgacttttttctggatactggttgttagtgggatggttatgctattttaaataatagcttatcgtttaatcacttgagtttattctgcatcaggtggatatatgagcaataaacgaatggcttagctgtaagtaattcgtgctatcgccaatgccaatctttgtaaataggtcagtatataaatactggcctattttataaactgatatacaattgtgctgacattttcttgcggattgttatatgaaaaagtaccagcagctggcgcagcagattaccgaacagattggccttggggtgtggttacccggcgaccggctgccctcactgcgggaacaggtggtcagcagcgggatgagtttcatgaccgtcagtcacgcctaccagctgctggaaagccagggccggatcattgcccgcccgcagtccggctattatgtcgcgccgcagccgatcaaacagcgccagcctgagccgcccgcccaggtgacgcgcgatgagtccgttgatatcaacacctacattttcgaggtgctgcaggccagccgtcaggcgtccatgctgccctttgcctccgcttttcccgatccgcgcctgtttccactgccgcagcttaaccgctctctggcgcaggtcagcaaaaccgccaccgccatgagcgtgattgaaaacctgccgccggggaatgatgaactccgccatgccattgcccgccgctacgcgctgcagggaatgaatatctcgccggatgaaatcgtcatcaccgccggagcgctggaggcgttgaaccttagcctgcaggccgtcactgaaccgggcgattgggtcgttgtggaaaacccctgcttctacggggcgctgcaggcgctggaaaggctgcgcctgaaggcgctgtcggtggcgaccgatgtcaaagagggcattgacctcgacgcgctggagcaggcgttgcagaattacccggttaaagcctgctggctgatgaccaacgggcaaaacccgctcggctttaccctcagcgcggagaaaaaaacgcagctggtcgcgctgctggcgcgctacaaggtgatgctgattgaagatgatgtttacagcgagctctatttcggccgcgagaaaccgctgccggcaaagtactgggatcgcgacgatatgacgctgcactgcagctctttttccaagtgcctggtccccgggttccgtattggctgggtggcggcgggcaggcacgcccgacgcattcagcagctacagctgatgagcacgctctcaaccagttcacccatgcagctggcgctggtggattacctttcgaccaagcgctatgacgcccatttgcggcgtttgcgccgccagcttgccgagcgcaagcagctggcctggcaggcgctgctgcgccatctgcccgcggaggtgaaaatccatcatagcgacagcggctattttctctggctcgagctccccgccgggagcgacgcgggggagctgagcgcccgcgcgctggcgtataatatcagcattgcgccggggaaaatgttctccacctccgccagctggaccgcattttttcgctttaataccgcgtggggctggggcgaaagagaggagcagggggttaagcggctgggcgaactgattcgcgagatgctggcgtagctgggatggcggtccgcttgcccgggcaggggaagtttagtggcgcccgggcaagcgcagaatatccctgaccggtccggccgccacccggcaaaaaaccgcggcggcagagaaaacggttttttcatttatccggtttttttatatccagcggttatccctttccttaaaaatatgccgctgacgcaggctgaatatcatgcccgttattattgttccgcggtaaaccatatgaaatttgcatagtcatattaactcgctaaccgcttgtctataatccgcaaagttagcccgtgtcgcacgttttgtgcgtaatgcgccccttgtcacaacctgaataaatttccccgggaggccatagcgcgccgtctactgttattaagggagatatttttacggcatggctgccgctcattttcttgtgacaggagtaagacccgatgagcaaaaaaattgcccgtggcagcctttgcgtgctgggtatggtatgcctgacggcgcaggccgccgagccgccgacatctctcgataaaggcgaaggccgtctcgatattatcgcctggccgggatatatcgaacggggacagaccgataaaagctacgactgggtaacccagtttgaaaaagaatccggctgtcaggtcaacgtcaaaaccgccgccacgtccgacgagatggtcagcctgatggcgaaaggcggttatgacctggtcaccgcgtccggcgacgcctcgctgcgcctgattatgggcaagcgcgtgcagccgattgacaccgcgctgatcggtaactggaagtccctcgacccgcgcgtggaaaatggcgcgtggttcaacgtcaacggtaaggtttacggcactccctaccagtgggggccgaacctgctaatgtacaacacgaaaaccttcccgacgccgccggacagctggagcgtggtgttcgtcaaacaaaacctgccggacggtaaaaccaaccttggccgcgtgcaggcctatgacgggccgatttatattgccgatgccgcgctgttcgtcaaagccacccagccgcagctgggcatcagtgacccctatcagcttaccgaagcgcaatatcaggcggtactcaaggtgctgcgcgatcagcacgccctgattcatcgctactggcacgataccaccgtacagatgagcgattttaaaaacgaaggcgtcgtggcctccagcgcctggccctatcaggccaacggtctgaaggcggaaggtcagccgattgcgaccgttttcccgaaagagggcgtcaccggctgggcggacaccaccatgctgcatagcgacgcgaaacacccggtttgcgcctataaatggatgaactggtcgctgacgccgaaagtgcagggggatgtcgcggcctggtttggttcgctaccggtggtacccgaggggtgcaaagccagcgcgctgctgggggacaaaggctgcgagaccaatggttacaacgaatttgccaaaatcgcgttctggaaaacgccggtagcggaaggcgggaaatttgttccctatagccgctggacccaggattacattgcgattatgggcggtcgttaagtcgccggaggcgaagaacatgcacgcggtagagttcgataatgtttcgcggctgtacggcgacgtgcgggcggtggacggcgtcagcatcgccattcgcgatggcgaatttttctccatgctggggccctccggctccggcaaaaccacctgcctgcgcctgattgccgggtttgaacagctttcgggcggcgccattcgcatttttggtaaagcggccagcgaactgccgccgtggcagcgcgacgtgaatacggtgttccaggattacgcgctgtttcctcatatgtcggtccttgataacgtcgcctacgggctgatggtcaaaggcgtcggtaagaaagcgcggcatgcccgcgcgctggaggcgctggagaaggtcgcgctcgcgtttgtccacgcgcgcaggccatcgcagctttccggcggccagcgccagcgggtggcgatcgcccgcgcgctggtgaatcagccgcgcgtcctgctgctggatgagccgctcggggcgctggatttaaaactgcgtgaacagatgcagctggagctaaagaaactgcagcaggcgctgggcattacctttatttttgtgacccacgatcagggcgaagccctgtcgatgtccgatcgcgtggcggtgtttaataatgggcgaatcgaacaggttgatgcgccccaggacctctatttgcggcctaaaacggcgtttgtggccggctttgtcggcaccgccaacgtattcagcagcgagcaggcgcacaagctgtgcgcgatggcgggaacgtggtcgctgcgcccggaacatatccggctgaacgttgccggggagatccagacggagggcgttgtgcaggcggtgcagtatcagggggccgcgacccgcgtcgaactcaagctggcgaatggcgagaagctgttggtgagccaggcgaatagtgatggccatgccgcgctaaacgcgccgccggtagggcaaacggtgctggcttcgtggtcgcgagcggcgatggtgccgctggagagcggaggctgatatgacgatggcgattccgtccgccaccaccgggcgcgtatccgcgctgttctggcgtaaaccctcgctggccctgtttttgcttctgcttggcccgctcatgtggtttggcattgtctatctgggatcgttgctgaccctgctatggcaaagcttctacaccttcgacgatttcaccatgtcggtcactcacgacctgacgctggccaatctgcaggcgctgtttaacccggcgaactacgacatcattatccgtaccctgacgatggcgctgtcggtgaccgtcgccagcgcgattctggccttgcctatggcctggtacatggcccgatatacccggggcaagatgaaggcgtttttctacatcgccgtgatgctgccgatgtgggcaagctatatcgtcaaagcctatgcatggacgctgctgttggcgaaagatggcgttgcacagtggttcctgcgccatcttggcctggaaagcgtactgagcatggtgctgacgatcccggcggtcggcggcaatacgctatcgacgtccggactggggcgcttcctggtgttcgtctatatctggctgccgtttatgatcctgccggtgcaggccgcgctggaacgcctgccgccatcattgcttcaggcctccgccgatctgggcgctcgtccgcgccagaccttccgctacgtggtgctgccgctggcgattcccggcattgccgcaggctcgatttttaccttctccctgacgctcggcgattttatcgttccgcagctggtggggccgccggggttctttatcggcaatatggtctattcccagcagggggcgattggcaatatgcccatggcggcggcgtttaccctggtgcccatcgtgctggttgccctttatctggcgtttgtgaaacgtctgggagcgtttgatgcactctgaacgcgcaccgctgctcctgaaagtggcaacctggggaggggtgatctttctccatttcccgctgctgattatcgcgctctatgcgtttaataccgaagacgccgccttcagctttccgccacagggcctgacgctacgctggtttagcgaagcagcggggcgcggggatattatcgattccgtgacgttgtcacttaaaatcgccgcgctctccaccgctatcgctctgctacttggcacgctggctgcaggtgcgctatggcgcagcacgttttttggcaagaacgccgtctcgctactgctgctgttgccgatagcactacccggcattatcaccggactggcgctgctcactgccttcaaggccgtcaatctggaacccggattgctgacgatcgtcgtggggcatgcgacgttctgcgtcgttgtggtgtttaacaacgtcattgcccgctttcgccggacctcctggagcctggtggaggcgtcgatggacttaggcgccacgggctggcaaacctttcgctatgtggtgttgcccaatttgggttcggcgctgctggcgggaggtatgctggcgtttgccctgtcgtttgatgaaattatcgtcaccacgttcaccgccgggcacgagcgcacgctgccgctctggctgctcaatcagctcggacgcccgcgcgatgtcccggtgaccaacgtggttgcgctgctggtgatgctggtgacgatgatgccgattctgggggcctggtggctcacccgtgacggcgacgtcagcgctgaaaacggaaaataaaatatcgatacaggataatgctatgcaaaataaccttttgattaacggtaagttagtggctggagaaggcgagaccgtgccggtgtttaatcccgccaccggtgacgagatcctgtcgattgctgaggccacggcggcgcaggtagacgctgcggttgaggccgcggatcgggcctttgttagctggagtcagaccacgccgaagttccgcgccgaatgtctgttgtcgctggcggacgtgattactgaacatgcgcaggcgctggctgagcttgaatcgctcaactgcggtaagccgctgcactgcgtggtcaacgatgagctaccggcggtcgccgatgtcttccgcttctttgccggcgcggcccgctgtctgccgggcatggcggcgggtgagtatctcgaaggccacacctccatgattcgccgcgacccggttggcgtggtggcctccatcgcgccctggaactacccgctgatgatggcggcatggaagctggccccggcgctggcggcaggcaactgcgtggtgatcaaaccctcggagatcacccctttaacggcactcaaactgggtgagctggcaaaagacgttttcccggccggggtgcttaacgtgctgtttggccgcggcgcaacggtcggcgatccgctgaccgctcacgagaaggtccgcatggtgtcgttgaccggttcgatcgccaccggcgcgcatatcatcggccataccgcatcgtcgattaaacgtacgcatatggaactgggcgggaaagcgccggttatcgtctttgatgacgcggatatcgacgcggtggtggagggcgtacggacctttggattctataacgcaggccaggactgtaccgccgcctgccggatttacgcccaggccggagtttatgaccagctggtggaaaaactcggcgccgcggtcgccagcctgaagatgggcccgccggaagacgaaacgaccgagctggggccgctgagctcgcaggcgcatctggacagagtctgcgccgcagtcgatgccgccagcgcgctaccgcatattcaggtggtcaccggcggcagcaaagcgccaggcaacggttactattatcagccgacgctgctggcgggagcgaagcaggaagatgcgattgtccagcgcgaggtcttcggcccggttgtcagtattacctcatttcatgacgaagagcaggcgctgagctgggccaacgattcgcagtatggtctggcttcgtcggtctggaccagggacgtcggcagggcgcatcgcctgagcgcgcgtctgcagtatggctgcacctgggttaacacccatttcatgctggtgagcgaaatgccgcacggcgggcagaagctttcgggctacggcaaggatatgtcgatgtacggtctggaggattacaccacgatccggcacgtcatgattaagcacggataggacgcgttcgtgataatcgcgaagcggactgattaccctgctaatagttagttatagcaaaaaaagctaaaacggaagcgctgctttatgagaatattctcatgccccttcaagagctaagccatgatgagtgccggagataagcgccggatggggctggtaccccccagggtgcaggatgcacccttaacgggacactgcaacgattgataatgattcgtaagcccctgcatgatatgcaggggctttttgttgtacggtcgctgcgggtttgttactgctagtgcgcctgatatcgtagcgtcatcaatttattacgtatgaggtcatctggtttttcgaaaatgattatcagactaacgttttgtttttttgctcggtaaattcgcctggcgacgttcgcgaacataggaaaaaagattataaattgcagcaatgagtaaaataagcgccacaatgagaagggcgattcctgacatgtaccacctcaaaaataaatgagtaaaaaacaagcttcgcataacttgtgattatgaatgtatgattttgtgctaaataacgcaaatgatatttcttatcatttaaaacctggcggggatgtctggctgtctgctgtcgttgtaatctattgatgtataaataatttctaattatggggtcattctactgcaatcctgtctgccctggaacctgctaataatgatgatcgcataccggcatcgcgtccaggcgagtataaagaacagtaaacaattccccaccggtatgaaaagcgcctttgtttttaactctaccgttaagcgctggcggtcgtgccgggatgatattaaggtccggcattaaccctattaataatcatgttattgaacgcggcagatgaaattattatgcctgcgatcggcaatataaatccggtgatatttattcgcgcgcgataatctttagattctgcgtaattgtaatatttatgttaaatattacgcatatccaggacgttgataagagaaaggacgcaggtttgactttctatagccgctcatgcgaacattcggcgcaatttgttgcttcgaagttgatattgttttgaaaaaaatagcgtgtttcctttttgtggcctgcgccacggcgatgctttacgggaattttccggccaaacagattatgggctgtgaagagcagggcgtcgcggaaccggtctgcatggcggccgcatgggatagtgaaaaagtcgatcttttgccggcctggaatcccgacgtccagaagctgattaccgcgcaaaagaccctgtctgctgcggagccggggtctttcaaatcgtaaaaaagcagccttcatgggctgcttttttaggtttcattgctgagtaaaatcgctaaaaccaaccaaaacgaacggataacaggccgataagcgcaagtgccgcgccgacatttatcagaagaacggttttgctggaaacatccataacgccacctttataaataagcctctacatttatagtacgagctcaaagtttgcgctatcggacaaagacgaatcgggcgtttttctgaaattaaccctgttacctgttttaaaataccataatctctgacgcactctgggggtgcgaaaaggcatcgcgatcggcgaaaatgcttgtcagggaaggaagaagaaaaatgacgttataccagaaaatgctgattttttacggagttatgggcttcatctgcgcggtaatcagctggttcttaacgaaagagagccgctggatccgcctgctggcggcgctgttgattggtgcgacatggccgttcagttttcccatggcgctgctggtctccctgttttgaaggaaaaattgatggctcactcttggttatgactgtataaaaaaacagtcatcactcacggagccttttcgatgcttagtttttactcttcacaggctggcgctatagtgcgctggctcgacctgcccggtcgcggcgaccctgttgtttttatccacggcctgggctgcgcctctacctatgactatccgcgcgttgccgccgacccggcgctggccgggcggcgaatgattcttgtcgatttacccggtttcggctacagcgataaacccgagtccttcggctaccgtattggcgatcaggccggggtggtggttgagctgctggaccgcttagggcttgagcgctgctatctatatggccacagcatggggggcagcgtcgcgattgaagcggccgagcggctcgccggacgggtgcgggcgctgctggtggccgagcctaatctctatcccgggggcggcatgtacagtagacgtatcgccgaacagactgaagaacgctttattgctcgcggctacgccgacatgctgtccgccgacgcttcgccttgggccggctgtctgcaaaacagcgccccctgggcggtgtggcgcggcgcgaccagcctggtgatgggcgttaatccctcctggtttagccgctttatccacttatcctgtcctaaggctctgatatacggtgaagattcgctaccggcccgggaagcgacggatagcgaagccgccgggatcccgctgctggtgataccccaggccgggcactcaatggcgtgggaaaacccatcggcgctggcccgtacgctcgccgatttttactccgccattgaggcagaagcctgattcgtgatcgccgcacataaaagaaactatatttcatttattttgatatatgatttcttttattcatggcgagcgtgaaatgcgaaaaatcactatcctgggtatctcggctttactctttacaccgctgcttctgcaagggtgcgcgacgcaaactccccgcgggacgacctcccgtccacagcttacggcggcagaagcggcaaccttcaccattgagcgctattttgcgcaaggcggcgcgttaaatgaccccgatggcccctggtcgccatcgccggttcacctcccgcaaaccgagagcgcgtggcgcgtggcaccctcgggagcgccgttcacccgcattcagcaggcggttaacgcggcaataggccagcatggggcgcaggaggcgcgcatctatatccgcatcgaaccgggcatctatcgggagacggtctatatccctgaaggcgcgccgccgataaccctctacggcgccggagatagtcctgaagaggtgagaattgagctggcaatagactcgcagttctcggtagcgcgctatcgccagcgggtaaatagccaacagcaataccgcgaaggcgatccggcatggtatcagtatgcgctgtgcgccgggcgaaccagcaagacgataggcaccaactgcgcggcggtggtctggtcgcaaagtgcggattttcagctgctgaatctcagcgtagccaatagcctgctggataccgtcgacggtgggacgcatcagggcgtggcgctgcggacggacggcgatcgcgtgcagctggagaacgtccgcctgctcggacgtcaggacacgctctacgtaaataccagcaatcggcgcaatgaggcggtaaccgaccgtatcagccgggtatacgtgaaagacagctacgtcgaaggggatgtggactacgtctttggccgggcgaacgccgtttttgataacgtccattttcacaccgtctcaacgcgccgctcgcctgaggcatacgtgcttgcgccgaatacgttgccggataatccatacggctttctggtgaagaatagccgctttaccggcgacggcggctatcagggcagcttcaaggcgaagctgggccgcgcctgggatcagggggcggggaagaccggttatttagcgggtaaaaccgctaacgggcaggtgcttattgccaacagtattatcgatcaaagctacgatcggctttccccctgggacgctgcggccaccaccgcccggccgttccgcggcaacacttccgcagaacggcagcttgatgatgttgccttcaatcgcctgtgggaattcaataaccactggcagccctgaggcttaaaacgggagctcgcgcgggaccgtttgcagcgttacccagcgtagctcggtaaactcggcaattcccgcgcgtccgccaaagcggccgtagcctgacgatttgcagccgccaaacggcatttgcgcttcgtcatgtacggtggggccgttgatgtggcaaatgccggtttgcagattttgcgccaggttccacgccctggcgctgtcccggctgtatatcgccgacgagaggccatattcgctttcattggcgacggccagcgcttcagcttcgtccttaacgcgaataatcgatttcaccggaccgaacgactcctcatgccagatgcgcatttcccgggtgacgccatcaagcagggtggcgcgcatttgcgtcgaatcggataggccgccggccagcaggcgcgcccccttcgccagcgcgtcctctatcaaggcattgcagcgggtgacggtcttcatgtccaccaccgggccgagcaggctggcgggcagggcggcggcgcgtctggccagctgcgccacaaacgcttccgcgactgtcgcgtcgacgatgatgcgctcggtggacatgcagatttgtccggcgttggcaaatgcgccaaaaattgcgcctgcggcggcctgttcgagatcggcgtcatccagcaccagcagcggcgctttgccgccgagctccagcaccgcgggtttcagatgttcgccgcaggtgcgggcgattatccgccccaccggcgtggagccggtgaaattgatgcggcgtacggcgggatgggcaatcagtaactccaccagcgcaggcgcgtcggcgggggcgcaggtcagataattgaccacgcccgcgggaaagcctgccgccgccagggcatcgataatcagcccctgcgtcgccggtgaaagctccgcgcctttgaggataaccgtatttccacaggccagcggcgtggcgatagcgcgggtcgcgaggattaatggcgcgttccacggcgccatgccaagcaccacgcctgcgccctggcggatgcccaacgccagatttcccggcacgttggaagggatcacctggccctcaatttgtgtggtcagggcggcggcttcgcgcaggatatcggcggccagatgaacgttaaaaccggcccagtgcgcggtggctcccgtttccgccgccatcgcggcgataaatttcgcctcatggcgcagcatctcttccgcggcctccagcaggagacgtcggcgctcggcgggtaccgtatcgcgccactgcgggaacgccgcgccggcggcagcggcgcagcggcgggcgtccgccaggctggcggcgctgcaacggaggcgcgttcgtgcgtgagcggattatcgcgggtaaaggtggcatgaccttcagcatcatgccactggccgttggtgtacagattgcaggttattgtcattattggcttctcctggcgttacgatttgccgagtgtaccgggttgcgccgccgcgcgctggcggtcgggcggttatcgcccgcttttttcgtaactttgcgcagggttcacatttatgaagaagttcgatgacgccaatcgagaggatgttgaatttatcggcgaaaacgcggtttttagcataacctgatagcaattgattatttgccggttgaattctcctgtgctgttattaaaggacttataacaaattcataaggcttataaccatgtctacagggaaaacgtttcttgcgctggcgttgagcgcgctactgccggcgtcaggcgcctgggcggcgggcaacgatacgctggtctattgttccgaagcttcgccggaatctttcaacccgcagattgccagctcgggcccgtctttcgtcgccagttcccaggtgctttataaccgcctgataaactttgacccggtcaaaaatacgccgattccctcgctggccaccgaatggcgcgtctccccggacggtaaaacctggactttcaccctgcgtaagggcgtgcagttcaacagcaacaaatacttcaagccgacccgtgatttcaacgccgatgacgtgctgttctcggtgctgcggcagaaagatgccagccatccgtaccataatgtttcccagggacattacgaatacttccacgacgttgggctggataagctgatcaaagacgtcaaaaaaatcgatgattatcacgtgcagtttgtgctgaacgagccgaacgcggcgttcctcgccgactggggaatggattttgcgtcgattctgtctgccgaatatgccgatgcgatgctgaaaaaaggcaccccggagtatgtcgatacctggcctattggtaccggaccctatgcgctgcagcaatataaagcggattcgctgatccgctatgtcgccaacccgcactactgggacggtgacgtgccgaccaaacacctgattttctcgatcacaccgaacgttgagacgcggctggcgaagctgcaaaccaatgaatgccagattatccccgcgccgtcgccggtacagttcccggtgattaagggcaataaagatctggcgctgcatgcggttgaggcgctcaacgtaggctatctggcctttaataccgagaaaaagccgtttgataacgtactggtgcgccaggcgctgaactacgctaccgacaagcaggcaatcgtgaaagcggtcttcctggactccggcagcgtcgcgaaatcgccgatccccgccaatatgctgggctataagaaagatctgcctgattacgactacgatccgcaaaaagcgaaagatctcctcaagcaggccgggctggaaaaaggggccgaagtcaccctgtggtcgatgcctgtgcagcggccgtataaccccaattcccgacgtattgccgagatgattcaaaatgactggagcaaggttgggatcaaagccaaaatcgttacttatgaatggggtgaatacctcgccggcatgcgtaaaggcgagcacgacagcgcgctgtttggctggatgtctgataatggcgatccggataacttcgccggcaccctgttaagctgcgataacattaaaaccggctctaacgttgcccgctggtgcgataagacctacgatgcgctggtgaaaaaggctatcctggtcagcgacccgcaggcgcgcgccggactctacgctcaggcgcaggagatttttcagcagcaggccccctggatcaccctggcgaccggtaacaccttctacgcgacgcgcagcaacgtgagcggctacagcgtgagcctgatgggcagcgatttttccaaagttaaactcaattaagccggaaggagagaagcatgtcgcatctggatgaggttgtcgcgcgcgtggacgccgcgattgccgaaagcgttattagccatatgaatgaactgctgatcgcgctgagcgatgacgcggggctggggcgggaagagcgctacgttcagcagcagcgtttgcgtaacgccatcgcccaccacggccgccagcagcacgaggagcaggaagctcgccgggagcagctgacccgcggcggcgagattcactagttacgccgctagaactggcgtctggccaccagccaggcgccgataaccagcatcaccgccccgcagagcgggccaaccagcgcgcgtagcgggacgtggtgcgcgcgaatcagatctagcactaagcccccaaccagctggctggcaatcaataccgcaatcgtggttgccgccccgacgttctgatagccgctgatgctggcaaagacaaagaacgagcccagcagaccgggaataagcgtccaccactttacgctgaccgccagctcctgaaaccccgccgcgccgtgcttaagcagcagtattgtcacgaaaatcacgatgccgaccagcgagttaagcagcatggcgatcaggatggtcgatgcggactgggtaatgcgcaccatcagcgtgttttgcagcaccagcccgacgccagcggcgattaaacaggccagggtcagcgtttgattcatgcgctgccgtccggatcgcggcgatcgtcaagctgcagctgcataaaggtcagatccagccagcggccaaatttcgtgccgacctgcggcatctgcccggtggtgataaagcccagcgtttcatgcagatgcaatgaagcctcgttttgcgcttcaatgccggcgaccatgacgtgcttattcagccgtttcgcctcggcgatgagggcgacgagcaggctgcggcccagccctttcccctgatgagcggggtggacatagacggaatgttcgacggtgtggcgaaagccgtcaaaggcgcgccagtcgccgaaggaggagtaaccggtaatcaccccgttttcttcgctcaccagcacgggataaccggctatctgccgggcttcgaaccaggcaatacggttgtcggtatcgacggttttgtcgttccagatggcggcggtatggacgaccgcatggttgtagatttcagcgattgccgcgcaatcgtctttgctggcatggcggatgctcatggtgtcctcaaagcttgtacactatagtagtacagtattattacaataatgtacgcaaggctgtcacctggtttaggcataaatttttcctctggctgaccaggtccgttgtgtgcgatgactgcgcgaccctgggttgcctgcgcagaaacatcatttgtatttatatttcatgattagagaatttattaaatatattactgttaatttgccgtcatattttacatttttatttaccggatttggattttcctgacatgcagaaaagaaattaatttaatcataactcattgattatattggtgatgatgtaaatcattgtgatggcagtccgctttttattttcacccaatagaactagtctaacccctgaagatatatttcggttaagcagagcgcatgtcgagaagttattcgatatggctctgttggattttatataacgatattctgtttacactattatgcgtatttatacgcagggaatgattttgctaacaagggtgaagcaatggcgcgtacacaaaatatgaagaaattaatgccgtcaatattggcaatggccatgggggctatattgggcaattccgctatggcggctgaaaccaccgcgctacaggcggcaccggcttataccgcgacgcagactaaaggggagacgctgtggagcaatgacgatacggcaatcggtattttaggatccgtacgtttaatggccaaaacggactctaatcatactcaggaacataatatacagaataatgactcgcggctgggggttgccgtgcggcataattttgacctgaacggcctgagtaattatgccgtcggttattatgagaccggcgttcatggtttagattccgccaccgatgaccagggcaatgatgtttatacgcggcaggcttatgccggtattggcaacgaccgctatggcgtggtgaccttcggcaaacagtatgctcccacggactgggggctgggtattgatacgacttatgcctggggcggtaaagcgaaacatgataccgccggaatgtcgacggatattattaattccgcggcaatctattattacaatgataacaatatgacgattggcgtcatggggcaaggcaatgacaacgtcgacagcatcggctttgcggcctacggcgatgggccgaatctgcatgacgcttaccgcgatggttcagccaccgttcacggcggcgccgcggctgccgcgcagtaccgttgggataacggcttctccgtctccagcgcggtggcgtataacaattacacggtaaatagcgggtcagtcagcggctgccagaattttggcccgaacggacactgttttaattacaccgataataacggcgatgcctatgacggcaatacttatagcatgggcatgaacgcgaaatatacgacaagcgttggcgatcatgcctggtataacggcgcggaggtgacttattacctcaataaagtgaatgatgttacagcggcgaccagcggccattacgaacataataaccagcagggtgatgaccaggaaacggtgcttggcctggaatatgattcacagtttaaaatcaccccggcctggagcgtgtacgttgattttaactggtcgcagggcggcgatgcgatggatgggcagcacttccagtcgacggtattaggcaccgattactggctggggaaaaacgcggtgacctatcttgaatacggctacgaaaaagcctggggcaacgataacgaagcgtggaatattgacgacaatcttggcgcagtggggctgcgcgtctttatctgacgggcgttttcttttcatttatggtcttgagggtgtttagttaacggattgcatccttttctgccttgcccggtggtgtattacgccgggccttttcacgataatcgccgctatcggcgtctggttgtagaaacagtagggctacactatagtgtcacgttatgaatactatagaagacaacctcaaccagcgcatcagcgcacgcatccgaatcgagcgggaatcccgcggctggtcgctcagcgaactcgccgagcgggctggggcgtcgcgggcgatgatccacaagatcgagcgcggcgaaagcagcccgacggcgtcgatgcttggacggctttccggcgccttcggcattagcatgtcgacgctgatcgccagggcggagatgcaggaaggcaagctgctgcgttttgctcatcagccggtgtggcacgatccgcagagccactatcttcggcgtcacgtttctccgcgtagcgacctgcctatcgatctggtgcaggtggaacttccggctggcagcgacgttcctatgcccgcgtcatcctatgcgctggcccggcagctcatctggctacagcagggcgaactggtctttctcgaaggcaacgcgcgccacgaaatgcaggcgggggattgcctggagctcgggccgccgaacgactgccgctttattaatgaaaccacgcagccctgcgtctatctggtggtccggctcaatcaatctgcctcataatgtcaatgcgcgttgccgggaaagcagctagcctcaatacagacttgtcaaaagaggagtttgttatggctttcaatccgcaacgccaccgccgttgggtgctggcatcccgtccgcacggcgagccgaccggggaaaacttccgcctggaagagggtgaggtcgcttctcccgggccgggacagctactgctgcgcaccgtctttctgtctttagatccctatatgcgcgggcggatgagcgacgcgccttcctattcgccgccggtcgccgttggcgcggtgatggtgggcggcaccgtgagccgcgtcgtgacatcgaaccatgatgattatcagcccggcgactgggtgctgggctacggcggctggcaggattatgaactctccgacggcagcgggctggtgaagttaggcgagagcccggaacacccttcctgggcgctggggatcctcggcatgccgggctttaccgcctatatggggctgctggatattggtcagccgaaagcgggtgaaacgctggtggtcgccgccgccaccgggccggttggcgcaacggtcggacagattgctaagctgaaaggctgccgtacggtgggcatcgctggcggcagcgagaagtgccgctatgcggtagaaaccctcggcttcgacgcctgcatcgatcaccgcgcgcccgatttcgccgtcaaactgcttgaagcctgcccgcaggggatcgatatctactatgagaacgtcggtgggaaagtgtttgatgaagtgctgccgctgctgaacacctcggctcgcgtgccggtttgcggcctggtcagcggctacaacgccaccgcgctgcccgacggcccggatcgtttaccgctgctgatggcgacaatcctcaaaaaacgcatccgtatgcagggctttattatcggccaggattacgggcaccggattgccgagttccagcaggagatggggcgctgggtgcaggcagggaaaatcaaataccgcgagcaggtggttgacggcctggagaacgcgccgcaggcgctcatcggtctgctgaagggcgagaacttcggtaaagtggtggttcgcgtctctcctgacgagtagctttttcccggcaggcatcgcgcctgccggttttatgatgatttacgcgtaaaaggccagccgctccgccagcaggtcaacaaacgcctggcgatcgacatcgagcatcaccgttgcgttcggcttcctgccggtcagattgtagaaatcgaccacggtcattccctgggtatatttcccctgcgtttccacgccgacccagcgttcaatggtggtaaacatctccggcttcagcagccaggcaatggtgcacgggtcgtgcagcggcgcgccgacaaagccccatttctcatccttatggtactcaaggaagaagtcgagcagttcggcgacgatggtggatatcgggttgccaatgcggcggaagcgctcaatatcctcaacgtgaatttgcgctttatgggtgacgtctaacccggccatcaccaccggaatgccggactggaaaacgatctccgccgcttccgggtcgacgtagatattaaactcgaccgccggctgccagttacccagcaccatcgcaccgcccattatcacgatgcgggcaattttggcatgcagttcagggtggctgttgagcagcagggcgacgttggtttgcgggccggttgcgacgatggtgaccggctcggcgctgtcgcgcagggttttggccatcagctcgacggcggtgcacgtctgggcggcaaagcccggttccggcagcgccggaccgtcaagaccgctctcgccatgcacgttatcggcgataatcagctcccgcatcaacggcttgagcgcgccgccggctaccggaatatccgggcgcttaagcagggtgagcatccgcaggacgttgcgcagggttttgtccggggtctgatttcccgcggaagaggtgacggctttaacattgagttcgggtgaggcgagggcaagaacgagggcaatcgcgtcatcatgacccggatcgcaatcgataatcactggcagtgccatagcagctccttgttggcgttattttgtgacaagggtaacgccgtaaagcggtatagacgaggcttagcgcaggatagtgtgatgacgtgcacgattgagcgccgatatcgcgcgacgccttgccaatctatctgcctgatccttgcgcaatcagggggtagtcatgcggtggcgcaaaaagtcgcttctcgcggaggcctataatgataaaacgactcaaccatacaaatattcatggtttgctttccgccaacggattcttattctaaagaaaacttcaagaggtaaccgcaatgaaagatgttgtagataaatgcagtaccaaaggctgcgccattgacgtgggctcgattattgataatgaggactgcgtctggcgggtagagaaaaacttcgccacccgcgaagaggccgagtccaccatcgcggccgtccgcgaacgcgccctggccgccgcgcccgccagcgagccgccgcaggtcgactataccatcgtggccgccggcgatgaggcaaagcttgaggcttcgattgccttctcctgccaggcggaaaagatcattttcgaattgtcgttaagaaacgtgatttaacgccatcgagcatccacggctaaccctcaacaggatcctgcaagcgatcccgttgaggtcccgcaatcaagcgttactcaaaccgccatgccagatttagaccgataccgtaattacggcccggcgccggttcgtagtagcggccgttggattcgttaacgataaccgagcccgcgtagctgcggtcgaacaggttatcgacgcggccaaacagatccatatccattttgccgtagctccatttatagccggtcgtcaggccgaccaccgtccaggatggggctttggcggtgttctcatcgttagccataatatcgctcatatagcgaatatcgctgcccgcgtaccagcctttttcgggctggtagccaaaggaggcatagcccatgttgcgggcgatccccggaatgcgattgcctttacagctggtatcatcacagacgttggtacgataggtcgcatccagccaggtccaggccgcttttaaacgccagctctcgccgaactgctgatccagccccagctccatcccctggcgacgggttttcccggcgtttttgtagctggtacgcccgccgctgctggcgtcgacgacaatctcattgtcggtgtcggtctggaacagcgctgcggtcaacaggccgttgccgatacgcgccttgctgccaatttcaacggtttcgttggtggacggctgcaggccaaagttcagcccgccctggtcgccggagcgataggaaagctcattaatggtcggcgtttcgaaaccacggccggcggagacgtagacgttccacgcgtcggttaccgcatatttcagcgatcctgccggcagccatttatgatagctggcctcgccgctgtcatcaccgttgcccggcgtaatgtaataatcgttggaatcgaaccaaaccgagctgtagcgcacacccgcgtccagagagagtttctcggtgagctgccactgggtttgcagatagggatcgacgttccacatcaggttacgctcgttgcggcgaaggtctcccttttcaccgtactgcggcgcgccgttgctcataacaaagttttcgtaacctttgcggcgctcgctcatggtttcgtaatcaagaccggtggtaaaggtgaccggcaccagcagctcgccgcggtgggtccagcgggtatcaattccctggtagtgacgcgtcaggtcgataacgccgccagcatgggtgggtttgagctgcggcgcgcgaggaatcgattgatactgcgtggtttcacgttcaccggcgtacatcatcacgctcagatcgtcctgctcgctcagctgtcgctcgtagcgtaaaccggcctgggtctgtttgatggttttgcgggtattgtactcatcgcctcttggcgactggcgcggattattttgccattcgtcgtagctcaggccgcccgcgtcattagctttaatatccacgctgttaaacagcagggtcagcttactgacgtcattgatgcgcacgccgagcttcgcgttggcgagattcttacgcgcgccgctatggtcgcgggagccgtgggtagtgaagcggttggtggaaaccacgtagtcgacgtcgcccgcatggctgccgtcgcccaccgcgccggtcgctttcataccgtaatgccaggtgccaaagctgccgtagtagctgctggcttcgatagtaggcggctggcttccggtctggctggtggcgttgatcaccccgccggaggagttaccgtacagggcggaaaaaggtccgcgcagcacctcgagcgaatcgaggctgccaatatcaatattcgaggtttgcccctggccatctggcatggtggccgggataccgtcgacgtaaatacgcagcccgcgcacgccgtaggtggagcgggacccgaagccgcgaatcgaaagctgcagatcctgcgcgtagttctggcggttttgcacctgcagtcccggtaccgcgcccagcgactcggagaggtttacccgcggcgcggcctggcgcatctcatcgccgttaaccacgctaacggcggcgggggtatcgagttcagaaaccgccgacggcgcggcggtaaccaccatagtctgttcagcggcgagagcggttggccctgcggagaccagcggcaaaagcagagcggggagcgcggcggcgcgcacggaaaggattttcatcaaagttactcacaaaacgaaccaaacggaacatatgtatatatgttagctcttttgtaaattttttgaaaagacttaacggaatttgagttaacaaatagcaagaattgcgagatgccgagagcgctacgggtaattaacgctccacattgcgataaataatgattactattcgcattccaaagaagagcgcaaagcgatgattttgcgccccggaagcactgtcgagcaggcatatatttgttttatcaaagggagtcgtcatgtcattacgtcatctgtccgcgccgcgtctgcgccgttcactgttgttaacttcgttactgctggcggggagctttagcgcccacgcggcggaagaaatgctgcgcaaagccgtcggcaagggcgcatacgaaatggcctatagccagcaggagaatgcgctgtgggtggccacctcgcaaagccgttcgctggataaaggcggtatcgtttaccgtctcgatccgacgactctcgaagtcacgcagattattcataacgatctgaaacccttcggcgcgacgatcgataacgccactcagaccctgtggtttggcaacaccaccgacagcaccgtcaccgccattgatgctaaaaccgggaaagtgaaagggcgtctggtgcttgacgcccgccagcgcagcgaaaccgtacgtccgctggccccgcgcgagctggcggtcaacgagaaaaccaacaccgtctacatcaccgggctgggtaaagagagcgtgatttgggtggtggatggcgacaagctaacgctgaaagacaccatcgccaatactggcgcaatggcgaccggcctggcgctggacgcggaagcgaaccgtatctataccaccaatgccgacggggaactggtgactatcgacagcaccagcaacaaaatcctgtcgcgtaaaaagctgcaggatgatggcaaagagcacttctatctcaacctgagtctggataccgccggacatcgcgcctttatcaccgacggtaaacagccggaagtgctggtggtcgatattcgcgatggcaaagtgctggagaagatcgccgcgccggagtccctggccgtgctgtttaacccgacccgcaatgaagcctacgtgacgcaccgtaaagccggcgaagtgagcgtgatcgatggtaagacctacaaagtggtcaagaccttcaaaacgccgactcatccgaacagcctgacgctctccgccgatggtaaaacgctgtacgtcagcgtgaagcaggagtcgacgcgtcagaaagaggcgacccagccggatgacgttatccgcatcgcgctgtgatcctgacgggagggggcaacctctcccgccatcagagcgctcgcactgcagccgggtggcggattacgcctcacccggcctacaaaatgcactgtttctgtctgcccgaaaaccgcacccatccagatatcaccctctgttacaaacacttattagcctgataaatgtaatggctataaacttacaactttcctgcgcaagcgggacggtggcattaatcctggagaaaagatgaaaaaatcattaatggttgtttgcgccggcgcgatgctggctcttctggcgggctgtagctcaaactatgtcatgacgacaaaaagcgggcagactatcgtaacgcagggcaagccgaagctggataaagataccggaatgaccagctatactgatgagtcgggcaataagcgccagattaacagcagcgatgtggctcagctggtggaggataattaagttgtgcctttgcggtttgcccggtgaggcaaaccgcaacgtgatttattgctgtttttcaatattcggcgcggtgctatgaatgtcatgcacgcgcttgcgcacgccaaaccagccggcgaccagcaaaacggcaatcagcggaagcgaaccgatggtataagtcccattcggataatcgaaagccattaataccagcacgctaagcaggaacagcagggtcagccaggaggtgaagggcgcacccggcatcttgaagctaacgtccgccgctttgccttccttgatcgccttacgcaggcgcatctggcacaccacaataaagccccatgaagcgataatccccagcgacgcgacgttaaggacaatttcaaatacctgcgaaggcaccaggtagttgaggaataccccaacgacatagacgcccagcgtcgccagaatcccggcgtagggcacgtggtggcggctcattttcgacataaacttcggcgccgaaccgcccatcgacatggagcgcagaatacgcccggtgcagtagaggccggagttgaggctggagagcgcggcggttaacaccacgatattcatcacgctgccgatatacggcacgcccagcttcgagaagaaggtgacgaacgggctctgcccggcctgataggcattccacggcagcagcagcaccagcagcagcacggagccaacgtagaacagaccaatacgccagataacgctgttaatggcgcgcggcaccatggtctgcgggtctttacactcgccagcggcggtacccaccagttcgatagaggcgaaggcgaacaccaccccctgtaccagcaccagcgccggcagcaggccgtgcgggaacaggccgccgttatcggtaatcaggtggaaaccggtggcattgccatccagaggctttccgctgccaagaaaaatagtcccgaccaccagaaacgcgacgatcgccagaactttcaccagcgcgaaccagaactccatctcggcgaaccatttcacgccgatcatgttcatggtgccgacaatcgccagcgcgccgagggcgaagacccactgcggaacgtcgccaaacgcgccccagtagtgcatatacagcgcgacggcggtgatatcgacgatcccggtcatcgcccagttgataaagtacatccagcccgcaacgtaagccgctttttcgccgaggaactcgcgggcgtaggagacgaagctgccgctggaggggcgatgaagcaccagctcgcccagcgcgcgtaagataaagaacgagaagaggccgcagaccagataaaccagcgccagggccggtccggccatctgcaggcgcgcgcccgcgccgaggaacaggccggtaccaatcgcgccgccgatggcaatcatctgcacctgacggttgcccatcgccttgtggtagcccgactcctgcgagttcagccagtggcgtttggcagcgtgctgctccgccacgctagagtgttttgtattcattgatgtcgctattttcctgtcaatgtccatgaagtggttcgtgctgctggctctctcatcattctgaggaatgagataagcgagcatggcggagaatcctacacgtatcggaaaatggacgcacgcaaaagatttgcggacagcacttgcttaaatatcaatgagatcggaagcttttcggtgttcgcgcatgacggggaaattttgctcatcgttttatcgttattgcgctattattctccgcccgcgttttgcccgagagaccacgatgaaaatcaacgtagtagggaccagcggcgtcggcaaatccaccctcgcgcgtcggctggctcaggaactgtcactgccttatattgaaatggatgtgctctactggctgcccgagtggcaagggacgccggacgatgagttctacgccaaactcgccgccgcgctcgccgcgcccggctgggtgctggacggcaactataaccgcagccgcccggtaaaatggcgcgatgtggatctggtggtatgggtggactacagcttctggcgcacgatccgccaggcggtccgtcgcgcggcttcacgcgcaagccgacggcaggagctgtggcccggcaccggcaattgcgaaaccttccgccgctctttctttagccgggactctattattctctggacgctgaaaacctggcgcaacaatcgccggcgttacctggcggatatgcaggacccgcagtatcaacacattcgctttgttcgtttacgcgaccagcagcagaccgaggcgctggtgcgcgagcttcggcagaatagccgataatcccccggctcgcgctgcgcttagccgggctaccggaccgcagattgtcggtaacccgtagcccgggtaaggcgtttacgccgcaacccggggaatatgccgtgacgtggcattgctgcggcttcttcccggcttgcgctgcgcttagccgggctaccgaaccgcagattgctggtaacccgtagcccgggtaaggcgtttacgccgcaacccggggaatatgccgtgacgtggcattgctgcggcttcttcccggcttgcacagctcctgcccgggctaccgggccacagattgctgaggacgcgtagcccggacagatgcgcagcatcgcctccggggcagttacctcaccgcatatctaatttccggcagagcacatgtaaataaattgtttctcaccagccgcgggcgcttctaataatgcagtcatgttaatccacatgagcctgcgaaatgtcttatcgaatcagtatcctggataaaagcccgctggcagccggagaaacggctgcccaggcgctggcgcgtacattaacgcttgcgcaacaggcggaagcctggggctatcatcgcttctggatagccgaacaccacaatactgaccagctcgccagtccgtcgccagagctggccattgcctggatcctcggccagacccgcaggattcgcgttggctccggcggcgtcatgctgcagcactacagcccgtataaagtggcggaaaacttcaatatgctggcttccctcgccccgggccgcgtggatctgggcgtgggcaaagcccccggcggactgccgctctccactcgcgcgttgcagcaggggcttaacccccagcaaaaggggcgttttgccgaccagctggcgcagctcgacaactggctgtcgctgaccgaaaccgacggtgaggagagcgtccgcgcaacgccgatcccgccgcgtcgcgccgacggctttctgctcggcgccagcctggagagcgcgcagctggcggcgcagctggactggaacttcgtcttcgccgcccatctcaacggcgataagcagctgctgcgcgaggtgttaacccgctggcgcgaactgagccgtcgcgacgcgattattgccgtccaggtcatcgtggccgaagaggccgcgacggcggcggagctggcaaaatccgtcgaaacgtggggcgttgagctggaaaacggccagcgggtcaccgtcggcagcgaagcgcaggcggccgcctttgcccgtcaggcgggcagcaggccgacgcgcatcgcccggcgggaatcggcggtgctgttcggcaccccggaacaggtgaaagcgcagctggatgccctgcagtcggcctggaacatcgacgaatttattatcgacacgcccattagcgatggcgcggcgcgccttaactccctgcgtctgctggcccgggcgcatttgagcgcggaggtgcagccatgagcctttccgaacagttaattcgctggcggcgcgaactgcaccagtacccggagctctcgctgcaggaggtcgacaccaccgcacgtattcgcgactggctgcagagcggcggcatcagcctgctgccttatgaactgaaaaccggcgcggttgccgaagtgggcagcggcgataaggtgatagccctgcgtgccgatatcgatgcgctgcctatcgaagaggcggccagcgtgccgtttcgctcgttgaatgccggcgtaatgcatgcttgcgggcatgatattcataccagcgtgatccttggcgcggccttactgctgaaacaacgcgaagcgcagctggcgggacgcgtccgtattctgttccagccggcggaggagagcttcggcggcgcgaaaaccctgattcgcgccggcgtgctggagggcgtttccgccattttcggtatgcataatgaacccgggctgccggtgggcgaattcgccacccgaggcggcgcgttttacgccaacgtcgatcgctttgtgtttaaggtgaccggcaaaggcgctcacgccgcccggcctcatgaagggaaggacgccattctgctggccagccagctggtgaccctgctgcaaagcgtcgccagtcgcgaagtgaataccctcgattccgtggtgcttagcgtcacgcggattcagggcggcaatacctggaacgtcctgccggaaagcgtcgagctggaaggtacgctgcgcacccacagcagcgcagtccagcagcgggtgaaagcgcgggtgagcgagattgccgccggcttcgccagcgcctttggcgcgcagatcgatgtcttctggtacgccggaccgaccgcgctggttaatgatgagcgctgggccgctttcgccagcgacgtggccgataagtctggctaccgcacgcaccatgcggatctccatctcggcggagaggattttgccatttatcttcagcatattcccggcgcgttcgtcagcatcggaagcgccagcgaatttggtcttcaccatccggcgtttaacccggatgagcgtttaatcgccccggcggcgcactactttgccgatctggcagagcaggcattaaaagcactttaattattcagggtcattgactaaggattaacgatgtctgaacaacggcagctgcgcattggtactatattacacggcgcatcgggaaatatgtccgcctggcgtcatccggccgcgctggccgacgccagtattaactttgagttcgtcaagcagacggcgttaaaagcggaagagggcaagctcgattttatttttgttgccgatggcttatatattaatgaaaaatcgatcccgcattttttaaatcgttttgaaccgctcaccgtattatccacccttgcggcggtaacttcgcgtttaggcctggtcggtaccctgtcgacctcctacagcgaaccctttaccaccgcccgccagttcgccagcctcgatcatctgagcggcggccgcgcgggctggaacgtggtcacctcgccgctggaaggttcagcaaaaaacttctcccgcgcccagcatcccgatcatgcgctgcgctaccgtattgccgatgaatatctgcaggttgtcaaaggcctgtgggactcctgggagcaggacgcgtttattcgtaataaagagagcggccagttctttgataaaaataagctgcacacgcttaatcatcatggcgatttctttaaagtagccggtccgctaaatattgcccgcacgccgcagggccggcccattatctttcaggcgggcgcctccgatgacggtaaaaagttagccgccagccacgctgacgctatttttacccatcaggagtcgctggcggaggcgcaggccttttatcgcgacgtcaaaagccagcttgcagcgcacggccgccgggagagtgaactgcatatcttccagggcgtcagcgtcatcgttggcgacagcgccgacgatgtggagcagcaataccagaccaccgctgcgctggtatcgattgaagacgcgctgaattatctcggccgctattttgaacaccacgactttgcccagtatccgctggatgaggcgttcccggatatcggcgacctcgggcagaacagctttcgcagcaccaccgacgagataaaacgcaatgcccgcgaacgcggcctgacgctgcgccaggtggcgctggaggcggccagcccgcgaccgcgctttgccggaaccgccgaagaggtggcggatggtctgcagcagtggtttgaacagcgtgcggcggacggttttattatccagggcggtacgccggataccttcccgcgctttgtggatcaggtggtaccgattcttcagcagcgcggactattccgccgggaatatcccggcaccacgctgcgcgaaagcttagggctggcagagcccgtgaatcaattccaaaaacaataatagagaacacccgctatgcagaaaacgcagaaaaaatcgctattactggcgctggcgctggccgttagcgcgtcatcctgggcgcagaacgtcacgatcaacgacaccggcgtgagcctcgaagccaacaaaacgccgattcatacggcgaaaaacccgcaggctatcgcgcagctgccgaaaggtctccacctggcggtgccgggtaagctgacggtcgcggtcgccgcgctgaactcaccgccgctgaccgtgttttctgacgataacaaaaccctgctcggcagcgaggtggatatcgcccgcctggtggccgacagcctcgggctggagctgaatgtggtacccacctcgtgggaggactggccgctcggcgttgcttccggcaaatatgatgcggcggtcagcaatatcaccgtgaccaaagagcgcaaagagaagtttgatttcgccacctaccgcaaagattcgctgggtttttacgtcaagagcaccagtccgctgagcaaaattgaaaaagcggaagatattgccgggctgcggattatcgtcggctccggcaccaatcaggaagccattttgctggcgtggaacgccgagaatctcaagaaggggctgaagccgtttacgccggtctacaccaaagacgacgccgcccagaccctggcgctgcagtccgggcgcgccgacgccttcttcggccccaacgtgatcggcgcgtggaaagcggcgctgaccggcaaaaccaagctggtaggcagcgttgacggcggctggccgaaggcggcgcatattgccgtgacggtgaaaaaaggcagcggtctggtagaaccggtacagacggcgctgaacggcgcaatccgcagcggcgactacgcgaaggtgctgaaccgctggggggaaggcgtggagagcattccgcaatcggaaatcaacccggccggactcggcgactaacaggaggcatgatgagcgatctattccgcgatgtctctccggaagcgccggagctgcagccgattattgagggcctgttcggcgagtacgccgcgcgctacggcgactatttctcccgcgatgccgaagtcgagctgactgaatggtatctggcgccgcaggggctgtttatcgtgctggagcgcgaaggggaaattatcgccaccggcgcgtacaaaccgaaagatgcccatacggcagaaatcaaacgtatctggacccatcgtcgtctgcgccagcaggggctggcggcgaaagtggtgcaggagctggagcgacgggcgctgctcgcgggctacagccatatctatctgaccaccggttttcggcagccggaagcggtgcggctctacctgagccagggctacgaggcgcagtttgacctcagccgcgatccggaagagtacagcctgccgccgttcgatggtcgactgcgctttacgaaagcgctggcggtcagcgcgctgagccagagcgcttaaggagccaatatgcatacccaggaaacgattaaggttgtccccgcgcgctatccgctgcgggcggtaggtgcgctgctggcgctgctggtgctggcggtggtgattcaatcggtcgcctttaacccgcgctgggagtggcgcgtctttgcccgctggttctttgacccggtgatccttgaaggtctcgggcagacgctgctgctgaccctgctggcgacggcgctgagcgttattctcggcggcctgctggcgctggcccggctctccagttcatggctgctgagcagcctggcctggggctatatctggctgttccgctcgctgccgctgatcgtggtgctgattattctttacaacttctcctatctttacgacacgctagcgataggcattccgttcaccgcgattcgctgggccagctttgagaccatcaacgtactggggcagttttctaccgccgttgtcgggctgactctggtgcaaagcgcctacaccgccgaaattatccgcggcggctttctcggggtcgatcacgggcagtatgaagcggcggcggcgctggggcttccggccagccgtcggaccctgcgcattattctgcctcaggcgctgcgcaccattttaccggcgggctttaacgaaattatcagcctcgccaaggggacggctatggtttacgtgctggcgatgccggagctgttttacaccatccagatgatctataaccgcacccaggaagtgatcccgctgctgatggtcggcgccgcctggtatctggcgatcaccagcgtgctgtcgctgatccagtatctggtcgagcgcggactggcccgcagcgaacgccgctcggcggtcaatagcgcccgcagcagccgtcgcgttgagtccattcgtcgcccacaaccccaggagtccgcccatgcccaactctcgtaacggccatatctccatcaccggcgtcagcaaatattttggccgccataaagcgcttgatgacgtatcgctggaaatcgaacccggcacggtgacggtgatcctcgggccgtccggttcgggaaaatcgacgctgctgcgggcgattaatcatctggagcgcgtggatgaaggctttattcagatcgatggcgactatatcggctatcgccgtaaaggcgacaagctctacgagctgaaagagaaagagatcctccgccagcgggttaacgtcggctacgtatttcagaacttcaacctgttcccgcatctgacggtgctggaaaatctgattgaagcccccatcgcccataagcaggcgacccgcaaagaggcgatcgcgcgggcgtatgaactgctggacgtggtcggactgcgcaataaagccgacgcctggtcgcggcacctgtccggcggccagcagcagcgcatcgctattgcccgggcgctggcgcttaacccgcgggtaatgctgttcgatgaaccgacctccgcgctcgaccctgagctggtgggggaagtgctggacgtgattaaaaagctggcgcgctccggcaccacgctggtggtggtcacccatgaaatcggttttgcgaaagaggtggcggaccgggtggtgtttatggtcgacggcaagatagtcgagcagggcagcagcgacgccgtgctgaaccaaccgcagcatccgcgtacgcggcagttcttatcgagggtattagcggcatgagaaacggacttttggccctgacactactctctttatctgcggcatcgcaggcggctatcgacctgcgcgccaacgagcagccgctgccggtgacccgcgatgagcaggcgatcgcgaagatcccggcaaattacgccttcgtcgaaccgggtaccttaacggtggcgatttcggcgctcaattcgccgccgctggcgctactggccagcgataaccgcacgcgtatcggcagcgacccggatattgcccggctgctggccggcagcctcgggctgaagctaaagctggtgcccaccgcctgggaggactggccgctggggattacttccggacgctacgacgtcgcgctggtcaatattgcggtgaccgagcagcggaaggagaagtttgattttgccacctatcgcgttgactctctggccttttccgtgaaatcaaccagcgatatcgcccgcgtgagcggtccggcggatctcgcgggtaaaaaagtgatcgtcgggtccgggactaaccaggaacggattttgctcggctggaacgccgaaaacgaagccgccgggcggcaacccgcgctgccggtctacctgaccgatgacgcctcgggcaacctctatattcagtccggtcgcgcggacgtgttctttgggccgcagtcggtggcggcctataaagcggcgctcagcggcaaaaccaaagtcgtcggcctggggccgaaaaaagcgtacgttgccaccacgaccaaaaagggcaacggcctggctccggcgctgcaggcggcgctgaacggcgcgattgctcgcggcgagtatcagaaagtgctggcgcgctggggagagcagggcgaagaggtgacgcaatcggaagtgaatccgccggggataacctactaaaaaaccgctgtttcgcaggagtgtgatgcgaaacagcggaggcgaatgctcgccagggttttaaatcaggcggcgcgcggggtcagcgtcaaacggtccagcggcccgacgataaacagataggagaacaggcccagcacgcccatggaaccgacgtacaggatggcgtaatcaaaggagtgggtattagcgaggatcacgccgataaccagcggcgtgataatactcgccaggttgccgcacatgttgaacactccgccggcaattcccagcatttccttcggcgaggtgtcgctcagcacgcaccagccgaggttaccgaaacctttagcaaagaaggccaggctcatggcggcgatcgccaccacttccgaggtggtgtagttggcgacgacaatcacgcaggagagcagcatgccgcagatcaccggcagcttgcgggcggtagtcaggctgtagccgcgtttgagcagccagtctgagaataccccaccgagcagtccgccgataaatccggcaatggccgggatactggcgacaaaaccgaccttgaggatcgacatacctttggcctggtagagataggtgggaaaccacgtcaggaagaaccaggtaatggacgttacgcagaactggccgatatacacgccgatcatcatgcgattaacgcagacgcttttaatctgcgcgagggttaatttttgctgcgtttttttcgtacctaattccggctcgccgccgccttggcgaatatagtcgagctcctgttggttaattttgggatggtaagagggatctcttacttttaccagccagaatatccccagcaccacgccgatagcgccaatataataaaatacgtagtgccagcttaaattatgcagaataatcgtcattagcggcgtaataattcccagggaaatatactgcgcggcctgatagaccgaggtgacgaatccacgctctttattgggaaaccactgtacgctgagacggctgttagcggggaaggcgggcgcttcaatcgcgcccatcatcagacgcagaatcaccagtacgatcaatgggctggcgaacagatagatcgttccctgaaacatggtgacgatcgaccagccaatcagcgcgcagccgtaaaccagccgcgaaccatatttatccagcagccagccgccgggtatttgcataatgacgtaggagataccaaaaactgaaaaggccagccccatcgcctcgggatcaaagcctaactctttgctcataataggcgcgacgacggacagcgttgcccggtcggcataattaaatacggtagccagaaataaaaacagtaatatgccgtaacgcacgttgctgcgttttaagggggtagtcatcttcaactcctttgcagggttgtttattgtgggtacagtcaataagaggtatttccccggcagggctacaggttttcagtcatctgcggaccggtagcccttacgccgccatccggggaattcggttaagggcgtttaccaaactcgcagctttgctgggtccagcggcgggcctgttcgctcagggtaaagcccagaccgtggcgttcggaaacccacatccgcccgtcgcgcagctccagctgttcgttaaacagcggattcagccactcgaagtgctccagccacggctcgagcgggtaggcggcggcgagatgcaggtgtacctccatcgcaaagtgcggggccagcttgcgaccgtgcttcgccgccagatccataatcttcagaaacggggagatcccgccgacgcgcggcgcatccggctggacaaagtcgctggcgttgccgaggataagctgctcatgttcgcggaagctggtcagcatctcgccggtggcaatcggcgtatccagcgcggcggcgagctgcgcgtggccttcaacatcgtaggcgtcaaggggctcttcaatccagatcagattgaactgctccattttgcgccccatgcggatagcggtttcgcgatcccactgctggttggcgtccaccatcagcgggaagtcatcgcccagcacctcacgcaccgccgtcaggcgacgaatatcttcggcggtattcggctgaccaaccttcagcttaatcccgccaatcccgttctcacgggagatagccacgttttttaacacctgatccagcggcgtatgcaggaagccgccggaggtgttgtagcactgaacggaatcgcggtgcgagcccagcagtttcgccagcggtagtccggcgcgtttggctttcatatcccacagcgcaatatcaagaggggagatggcctgtaccgccataccgctgcggccaacggatgcgccggcccacagtagtttggtgtagatcttgtcgatatcgttcggatcttcgccgagcagattatcggcgatctctttggcgtgggcgtaaatgccctggccgcccgcacgcttggaatagctgaagccaacgccttcaaagccgtcccgggagcggatttccgcgatgatgatcgccacttcggtaagcggtttttgccgaccggtcagaacctttgcatcgctaacgggggtcgccagcggcagaaaggccagcgacagtttgacgtgttcaatgcggtcgccggtttcagcggcggttttgacgccggaagctttggcgtaggtcacggactcggaattagcgctcgaggtcatagtcagttcctttttagtgataaaatgtttgcgctaacatttttaatcctgaaattgtcctggcgctacgacagtgattttaatttgtacaaacgatcacaattagcggttataaagggtaaaattatgcagcgcaggtcacgatccaaaaaggtttgtgaaaaatcacaaataaaaatgatagcgataacattttgtgtttcaggtatttgattctattggggatgtcgaggtgagcgctggcaattgcgcgggccatcatcaataatggccacagaaaacgactcaacacaggggcttagtcgtgaaaagcagaaaaccgacgcgcgcgccgacgctggatgacgtagcccgtagcgccggattgtcgtcgatgacggtcagccgggcgctgaatacgccgcagctggtgaggccaaaaacggtcgagaaagtgatgcaggcggtgcaggcaacgggctatatccctaacgcgctggccggcggcctggcctccaggcgcagcaagctggtggccgtggtggtgccgcaaatcaataacaatatgtttgtcgataccatccaggcgctgagcgataccctggcggcgcgcggctaccatatgctgctgtgcgtggcgggctacagccggcagaccgaagccgagctggtagcaaccttactctcccggcgtccggatggcgtggtattgaccggcattcagcacgccccggcgctgaagaagacgatcctcaacgccgccacgccggtggtggaaatctgggatctcaccccgacgccgctggatatgctggtcggtttttcgcatgaaaaagtcggcgaaaccattggcgagtacctgctggaaaaaggctaccgccgcccgggtctgctgtgggccggcgatgcgcgcgcgacgttacgaaagcaggggctccgcgcccggctggccaaaaacggcattgacgatgcgccgcaggtcgaggtgccgcttccggcatcgctggcgctggggcgtcgcgggctggccgagctgctcgccggcggcgagtttgacgttatcgtctgcagctccgatacccttgcccagggggcgattatggaagccgaaagccgggggctgcgcgtgccgcaggatctggcggtgatcggttttggcgatctggacttcgccgccagcaaccgtccggccatcaccaccgtcagcgtcgaccggcatgccatcggcgagcaggcggccacgctgcttgccgaccgcatagaaggcggagaagaacgggaagcgattattgatatcggctttcacctggtggcgcgcgagtcggcgtagctttgccgtttcgcatgtgcgagggggcctcaatagcggcatggcgtaatcaaatctatactgcaaaattgctaaacccgtcgccgctctgttcctgagcggcaaattcatcgagggcgcagaatatgatcaccgtctatggcgtacccggctggggctcaacaattagcgaactgatgctgacgctggccgatctcccgtaccattttgttaacgttgagggctttgaccagccgggcccgcagcgcgaccgcctcaaaaagataaacccgctgtgtcaggtgccgaccctgacgcttgcagacggcagcgtgatgaccgaatccgcggcgattgccctgatgatcctcgacgttcgaccggatctggctccggcgccgggatcgccgcagcggcatgcctttcagcgtctgctcatctggctggtggcgaacgtctatcccacctttacctttgcggattacccggagcgctgggccgccgatgcgccagaccagctgcgggaaagctgcatcagctatcgcaaatcgctctatctatggctggaggagcagcttgccgccgcgccgtatgcgctggggacggaaataaccctgctggactgctatattgcggcgatgtgcgcctggggcccgcgccgggagtggtttgcggcgcagacgccaaaattcgtcgccgtggcggatgcggtgtatcgccatcccaaactcgaagccgttctgcgccgcaacgagctgatttaaagcacaaaaagcgatccggattatgctagttttatcgtccagacaataaaggagcctgctatgccgcacgttgatattaaatgttttccccgcgacctgaatgatgaacaaaaagcggcgctggccgccgatattaccgaggtgttgattcgccatctcaacagcaaagagagttcagtgagcgtggccctgaagcaggttgagccgagcgactggcagcaggtgtgggacagcgaaatcgccccgcagatggaacagttgattaagaaaccgggctatagcatgtaacccggtttctttcccggaggcgatgctgcgcatctgtccgggctacgcgttcccggtgatctgcggtccggtagcccgggcaaggcgctctgcgccgcccccgggagaggggcactgaagcgaagtcatgagcgatacatcttgtcatgggtaaacgcgtcaccatgtacagggtacataaaactccttgattaatgtaccctgtacatgtattttgtctggtaagtcgtaaggacatcagggaatgagatgtttacttttattgaactacaaggtttcagtaaacgacgccaggcgctgttaccggatgatgaatttcgggccttccaggaaatcctgatcaatgatcctgaggcaggtgacaccatttcgggaaccggaggttttcgtaaaatccgctggagtcgtcccggaacgggaaagcgcggcggcgtgcgggtgatttactataatgtaacgataaagggaagaatctacctggcgctcatctatcctaaaaatgaacaggatgagttaagccaggagcagaaaaagatgttaaggcaggttgctgagttattaaactagccaataaacatgaagtgaggctgagctattaatgatcgatacattgatagcgccagagagccaactgaggtgtgtatgaaagacgaattgtttgccgatctgctggctagtgcagaagaaatggtcaggattgagaagggtgaacaaacgccgaaggtgcaccacgttcataccttcagcgaagttgatgtgaaagcgatacgcgaagccacaggtttaaaacagcaggacttcgccgccgccgttggcgttagctatgagctggttaaaagctgggaaacgaaacgacgtcatccaaccggtgcatccagaaagctgcttttattgcttcagggcaatccattgattatcaacttgttgaaggttatttgaaacgttattcttcgcaaggaaaatgacagagtttgccccatttcgtaaccagggcctttaaaaaggagagtattacgtatggaaaccaatgattctattttgacagaagtcgagaaatacagcgctcatattttatggtttttattttgttagtttaatgtacttcatactgtactggcatagtgacaaagtaaccgcgagtgtttaaataaacccgtccaggcgtttaccccggacgggctattttattaaaaccaaatctccgtctgcacgccgaagttccagttccccccggcggtaaagcctttactgccgaaatcatcgttgatcgcgtagcgatccagatctttatcccagttcatccacgtaacaaagaaacgtatctccggccgcgctttaatatccaatacatcgcccactttaaacgtcggggcgaaggtcagcttgtaaaaatcgccgctcaccgcctggtattgatgcacgccgctgtcgtagcgataggttcgtccgttgggattcaggtccatatattgccaggacgcctcgtacagcagggcgaagttgcgggtgatcccctgagaaacccgcaggttgaaggttgcccaatcgtagcggtccccgtcgcgatagcggtcttcgctatgctgggcgataaccgatggcgcaagctgccagtttttccccagcggcaaaataccgtatgacgcaaagcgcagagatttggcgttttcggtaagatcgccgtcgctgcccggctgccgcgcttcggcgcccagcccgccgccgtactgcagggcgctctccgatacgcccggcgcgaggccatagaattgctgtttgtcgtgatacgccagcatcgcgtagtagccgtttttcgccgtattatcgctgcgcagggcgtagctgccggtcgtcgacgtcgtatctttcaggtcatcgttaccctgggcggtcatcgccgtggtcatcagctgccagttgttccagaagtggttggcggtaaacatcaggttctgtatatcgttatcctgatagttatcgctgcccaattcgccaaagctgcgcgcatagaccgagtaatcgccgcgcagcgtgctgttccagttgacgtcattgatcccgccgccggtaccgccgaggaacataatatcgctatcggtaaagtggatatcgaagttatcgcggtcgaaacgcttgcccgcccagatggaggcgctcctgaacggcccggaaaaatcggcgaaattacccatctcgacgtacagctgacgcacgttcagatggtgactgtcgttatcctgcacccacggatccgggttggtcgcgccgtcggcaagcatggttttaaagtgcgcccacgacccgtcgctgaaggtcatttttttgccgaagctgagctccacgtagttatctttctcattgccgagacggccaacgtgggcgtcaccgttgagcgaactggccggcgagatccccggaccgccgcgcgcgcctttgccgtggctgttgaccagcattccggagcgggcgtaggcgttaaattcaaaaccgtcggtaaggcgggttttcgccagctgtttgtcggcagcctgctgcttttgctccgtggcatcggtgcgctggcttaacgtctgcacctgtttttccgccgccgccgcacgctgttctgccgcgctggtgcgcagctccgcctgctgcgcccgacgtttagcctctccggcctcctgctccgcatgattaagccgggcctccagcagcgccagccgttgttcgacggtgagcggggccgcatttgcgccgtaagccgaaaaaagggcgcagcaaaccgccgcgctaatcaaagagatacgcatattaatccttatttttttcagaggtatgaagggtgtgctgcgccttacagggcgtggttttctccggcgactgacgacgcgtccgacggcgcgcggcgtccggcatcaaggtcggcgcggatctgttcatactggtcgtcgaggcgatagaagcggccaatccacagcattgaggcgacaatcagcagcgccgggatatagaggtagcaggcttttatcgccagcatcgcgccgtcgctttgggcctggttggcgatatagccgccggatgagagcagtaccccggtaatagcgcccgcgcccgccatagccaccttgccaagaaagccgttgatagaggtcaaaatgccggcggtattgatgccggttttccacaccccgtaatccaccggatcggcctgcatggagaagtaaattgccgtgcgctgtccggcgccaagcgatagcaccaccgcaccggcaaccaggccccagctgttaacgcctgccgccatcatcatgcccatgccgaccaggttgatcgcgctggcgaccagataaacgtggcgctttttcatccggctggcgagcagcggcacggtgagggtacccagcagaggaacgaaggtggagatcccggcgacgatcgccgtgagatcgttattgccgacgtaataatggaaaaagtagaccagcgccccggtctggaagaaaaacgcgccccacatcaggaaaatattgatggcgaagacgaaccacggccggttggcgcgcaggctgacccaggcgcgttttaaggtcatgcgctcctgcgtaatgctgatattttccttaacgttccggaagctcaccagcaggaagaaggtggcaataacgccgaaaaccaccgccgtgtagaagaagccgtgctgctgattgcctttccccagcgcgccaaccagcggcagagtggcgaccgcgacgatggtcgcgccgagcgagccgagcagaatacgcaccgccgacagcgtggtgcgttcccgcgagtcgttcgtcagaaacggcagcatggcgcagaacggaatgttgacgatggtatagagaaacgacaggcacagataggtgacaaaagcgtagatcagcttaccggtggtgccgaaatccggcacgtagaaggccagaatacacagcaatccgaaggggatcgcgccaataagcagatacggacgacagcgtccccagcgggtggcggtattgtcgataaccagccccatcagcacgtcggcaacgccgtccaccagacgcgtcacgagaaacatcaggccaacgtaataggcgggcaggcccatcacgtcggtgtaaaagaacatcagataaagagagatcatctgccacacgaggttgcaggagaggtcggcgatgccatagccaaggcgctgccgccacagggtaaaggttgtttctgccataaaaatacactcgcttatcgttgttgttaaagtccgtactggcgaataaaccaggccggggtgcagctccacgcatggcaataactgtttatcagtttgctgccataaggggaaaaatcaggatgcgccgggtcgaagatttcccagaaggtatcggcgccgtagtcgaccatggctccccagtaggctttgatctgcgcaattgcctcgtcgcgcagcccgcactgcagaagggcggcgatatagtgatgacgcagatagggtgtgttcatggcgaccgcggggggatttttctccaggttgcgcatgatctcccggcgctgctgcggcgtgccgacttccgccagcaccagccagatttgcgatgcccaggagacctgccgccgggcgccgctgacgtaaaagccctgctgcgggtcccataacgcatcgagggccgccgatttgagctgctgtaaacgctggcgatagctgacggccagctcaggttcaaaacgctccgccagccagatagcgcgctgcaggcagtaaatcagtaccccctgcgccgccgcctgtttattcagcgacgcctgccagtcgataaacacccaccagtcgtcgctatcgcgcacaacgccggaggcgtcgcagcgggtcagcgccagttctacctgacgacgcgccgtgggccacagctcgcgggccgtggccatatcctccgcgctttgcagatagttgtagaggacgtcgacaaaaaacaatgaataatcaaaaagaaaggtatcgtccgcaatgacatccggctgcacgaacacgttggccgataccatgccgtcctcgcgagtatgcccggcaaaaaggtacaggcagcggcgcaccagatcgtggcgtgcgaaggtgacatcgttgaccagcgcctgcagacgtaaatcgccgagccacaggcggcggtcgcgtttggggccatcttcaaacacttcctgcatgcagttttgcagggtcagcacggcaacgttatcaatggcccggagctgcgggtcggaggttgtcgccgccgggcatgcgccgctggccgaggtgaccgcgttaacctcaatctgggtgaactgcaggcgaaacttgcgcgaaacggctttgacctccaccttcagatagcggaagcagtagcggcgcggcaggtcaatttcggcgggcaggacatcaagccacagatcctgctgctgcagccagctactgctgagccagccctgatagtcgctgaacggttcgcacacttcgctcagcgtttcgccgaaggtcaactgcagatgggccggagcgtccggcggactcccggcgctctggcagagaaaatgcaggtagccaacgtagtggctgccaaaatcaataatgacgctatcgccgctgctcagctcgcgctggtaaaacgcggccagggtgctcaccggctcggcgcgccagccgaagagcgccgcggcgtcggcgtgggcttcgactaccgcgatcggcgggtgtgcctgacgactcagcgcgggccggagcgcctcggcggtacgtaaaaaattcgggtggcgggtcatcatgacctgagaattatgctgaattgcctgtgacatactgcgtcctctgtgttgatttgtccgcagcataagacgccgccgcccgcggcaaccactctggcaatgccaatgcatctggcaaaatggcactgataatgagatgagcgggtcgccgatcacaattccataaatcttgctcgtggcggccggttaaatgcattatcttgcccctgcgccgtatgccgttttggacccgatcgatgatgctaaccgttgagtattatttcacccatccgcaggataagctgggaatgtacgccagcgatccggaagataatagccatgaacatagtcacgagtttgctgaactggtgatcgttgaagaagggcacggcttacacgttattaatggccggccattatatattcagcagggcgacgttttttacgttcagccgggagatgttcactattatgatgagctgggaacgcttaagttaattaacgtattaattaacccactggtagaatttcattatttacagcctctcgacaccttattgcagacgttctccgcacgaaaggcttcctgctacggctggctggcgccggatacccgccatatctgcaaggaattggtagataaaatattttctgccgagctgcggcgggggcaaaatattgccctgcgcgaagccgcctttttccagctggtgacgacgattctgcatgcggaaaccgaagccgaatatagcaccaccaaatataagctgcataaattgctgacctggctacaggagcactgttttgaagaacataactggccgcagctggcggagaaattccacctgaccacgcggaccgcttttcgccatattaaagaggcgacgggattgacgccggataattatttaaagcgtctgcgcttagtttcggcgcgcgtcaaattacgcgagaccgatatgacgattaccgaagtggcttatttatgcggttttgccaacagcaaccactttaccaccttatataaaaaggtctttggcctgacgcccagcgaagatcggcggcgtttgctgcgctagttcacctcccggaggcgatgctgcgcatctgtccgggctacgcgccctcagcggtctgcggtccggtagcccgggcaaggcgctgtgcgccgcccccgggagagacgcgcagggtggtgaagaattgccccggaggcgagcgggggctatttttccggggtattggcgcggacgtggcggccgctggcaacaaagttgccggtgccgagatgatggagggtattgatcttatcgtcgtcgaactgccagcgtccgctgacgaacgcgcgctcatcggcggcggcggaaaccacttcgccaaacagcgtatcgtactgctcctgagccgccgttgccggcagcagtcggcactccatccatgcaagacacttctcttcaatcagcggcaagcccagctccggaccttgcacgaccgggatgccgtaagcgttaaatttatcctcatcgcgtccgctgatgctgccgaccgcgtaggtccaactggcggcctcgacgccgggaacgacgatgccaaatgcgccgttgcgctcaataatttcccgcgtccaggcgcttttatctaccacgatggccagcctcggcggagcgaactccaccggcatcgaccacgcggcggccatgacgttgcggcgttgagagtgggcgtcatagctggttatcaaaattgttgggccatggttgagcaggcgactggcgtactgaagttccacgtggcgaaaacggctcatatgcgttccttggtaaatgggtctgatgccagacaacacgttaatccgcaatgaaaatgtaatcaatacgtcatcgagggtccctatagtcggcgtcactaagtcccaaagaggataacaatatgttagctcccctgaatttgtctcaggtgagcgcgcgccggcggatgttgaccgcgggcagagtctcgctttcccaacgggagggcgataatgcgcgcgcttaccagcattaaactcgacggcgtttctttcgccttcggcgctcacaccgtgcttaatcagatcgatctgcatatcgatgcgggcagcattgttgcgctgctggggccttctggctgcggtaaaagcacgctgctgcgtctgctcgccggattaaccgtacccgccagcggcagcattcactttggcgatcgcctggtggcgaaaaccggctggggcttgccgccggagcagcgcgatctcggtatggtctttcaggattacgccctgtggccgcacatgacggcggcgcagaacgtggctttcccgctgcgtatgcgcggcgtcgggcgtcagcagcgacagcaacgggtcgaggaggcgctggcgatggttggtctcagcggcttcgccgaccgcaaaccgtcgggcctttccggcggtcagcagcagcgcgttgcgctggcccgcgccatcgtcgcagaaccgcgcgtgctgctgttcgatgagccgctctccaatctcgacagcgagctgcgcgagtcgctgtgcctcgaaatgagcggcctgctgcgccagctgggcatcactgccgtctacgtcacccacgaccgtcgcgaagccgagctgctggccgacaagattattcatttatctgcgggctgcattgccgccgtccgcgccgtgacttcaacctcaggggaatccgtatgaaaaccgttatcaccgttaccaaaggagccgcgctcgcgatgatgttgtccgccaccacgatctccagcgcccaggcgctcaccgtctacaccgccgggccgggctcgctggcgaaaaaccttgccagcggctatgagaagaaaaccggcgttaaggtgaatattttccaggccaccaccggtaaggtgatggcgcgtctcgaggccgagcaggctaacccgcaggcggatgtgctgatttccgcctcgtgggatacggcggaagatttgcatcaccgcggctggctgctgccgtatcagagcgccaatgccgataaagtcccggcgaacctgaaatccgccgattacgttgctcagggtatttcggccctggggatcgtctggaataccaaaagcggcaccccggagccgaaagagtggcgcgacctgaccgaagcggcgttcaaagacaaagtgacgacgccggacccggcactttccggcgcgtcgctggatttgctgatcgggttacagaatggcatgggcgataaagcctgggcgctgtttgatgcgttaaagaagaatggcatggtggtcagcgggccgaacgcccaggcggtaacgccggtgatgcagggggcgaaagcggcggtattcggcgcggttgattatgtctcttacggcaatatccatcagggcgaatcgctaaaggtgattttcccggccagcggcacggtcattgcaccgcggccgatgatgatcctcaaaaccagccagcatgctgacgacgcaaaagccttcgttgattatgtgctgtcgccggaaggccaggcgctggtcgccgacgcctggcttatgcccgcccgcagcgatgttccggcgaagcgcccgctgctcaacgagctgaaaatattgccgaccgcaggcgagggcaatagcgaacgtagcgcggtgctttcccgctttaatacgcttttcgcccagtaaaccgacttttcccccgggcttcgaaagttggctcgggcacattcccggaggcggcgctggcgcgcctgtcggggctaccggaccgcagacggctgtgaccccgtagcccggctaagcgtagcgcgagccgggtaagatcgtatccaggaaaataccgtgaaacagagacttatttcagcgggtacgctggcggcgctgctggtgctggtggcattgccgctgctgtttattgtcctccaggcaatttttccccagtttagcgccggttcgctgggcggcgcgtttagcggcgtatcaacgctgattgccgacccgcagctgccgacgatgctcggcggtaccctgtgggtggcctgcggcgtggcgctgatgagcatggtcatcggtctaccgctgggcgtcttgcgcggattgtttactatcccgctgccgcggctgtgggatctgctctttctgatcccgtttctgacgccgccctatattgccgcgctgtcgtggatgctgatgctgcaaagtcatggctatctccagcagctgaccggctgggatctcaacgatctgttttttagccgcatcgggatcgtgctggtgatgaccctcaatatctttccggtggtctacttcgccgtctcgcgcagcctgttggccagcggtcagcggctggcgattgtcgcccgggtgcacggcgccagcgcctggcgagcgttctggcacatcacgctgccgatgctttctccggctctggcggcggggatgctgctggcgtttaccctggccattgaagagtacggcgttccggcggccctgggggcgcgggcagggctggtcatgctgaccgtaggcattgagaaaaagctcgccgactggcctgtcgatctgcccggcgcgtcgctgctttcgctgctgctgatcgcggtggcgctgctggcctggtggctgcaaaaacggctgaccggcgataaagaggtcaccagcgtcaccggcaagccgggagagaatagcggggcggagttgggctggctgacgcttccggcggtgctagtgatggcgggcgtcggggggctggcggtggtgatgccgggcgcgtcgatggtgctgaccagcctgatgagcacgctgtcgggcggtatccacgctgacaatgttacccttcgtcattttgccgcgctgtttgctcagcagggcgacgcgctgtcggcactggcaaccagcctttcgctggcgctggcttcggcaggggttgtcggcctggtggggctgctcgccgcctggctggttgtggtgcaaaaaatcaaggggagcgcctttgttgatgcgctatcgctgctgccggcggcgctgccgggcgtggtggtgggcgtcgggctgattctgctgtggaaccagccgttctggccggtgtccccctacaacacctggtttatgctgctgctttcctactgctgtctgctgctgccctggccggtgcgctacgtcagcagcgcgctgcgtcagcttggcaataatctcgaacccgcggcgcgggtgcacggcgcaacggccctgcaggcgctgcgtctgatcgttctgccgctggtctttccggcgctgctggcggcgatgctgatggtgttcgccgttgcctcccgcgagctggtgacctcgttgctgcttgcgccggccgggacgcaaaccgtctcggtgtttatctggcgccagtttgagcagggctcggcgggagagggaatggcaatggcatcgctgacgctctttaccggtctggggctgatgctctgcgcgctggcgctgatgcagcggggcacgcgcggataaatacgatcgcacaaaatagctggtcaggcgggaaaaacaggctataaatgtcggacaccgattgctggaggcattgatgagtccctttttaagcgcctatttttctcgtctgggctggacgggcaccccggatgtttcacttcacaccctgcgcgaactgcatattcaccataacggcgcgatcccctttgaaaatctggatgtgctgctgcccagagagatacatctcgacgatcgcaccctcgaagagaagctgattcacggtcgtcgcggcggctactgcttcgagcaaaacggcctgctggaaagagcgctgcgcgagatcggctttaccgtgcgcagccttctggggcgcgtggtgctggccaatcctccgcatatgccgccgcgtacccatcggctgctgctggtggaggtggagggagaacgctggattgccgacgttggtttcggcggccagaccttgaccgcgccgattaagctgctggcggatatagaacaatccaccccgcacggcgaatatcgcctgatttacgaaggggaagagtgggcgctgcagttcagccatcacggccactggcagtcgatgtaccattttgatttaggtcgccagtacgcttccgactatgtgatgggcaacttctggtcggcgcactggccgcagtcgcacttccgccatcatctgctgatgtgccgccacttgccggacggcggcaaaatgacgctgaccaatttccactttacccattgggataaaaaccacgtagtcgaaaagctcgatttagcggacgttccggcgctgtatgaggcgctgcaaacgcgttttggcctcggcgtggatgatgccaaatacggctttagcgaagcggagctggcggcggtgatggcggcgtttgatacccatcccgaggccggaaaataaatatcgtacaggaaccgttggctggataaggggtgactgtcaaacggggatgttacccggcttgcgctacgcttagccgggctacggggcgctcctgtcgcccggggttaggcgtttttgccgcgacccgggatgattacggattttgctcagcgtcttgaacgtaccacctggtagcggcgggtgaaatattcaaacggcgcgctccacacgtgaaccagccgggtgaacgggaacagcaggaaaatcgtcatccccagcaccagatgcacgcggaaaacaaaggccacgccgctgagcatttctgacgagccgccgcggaaggtgacgatgccctgcgcccagcccaccagcttcatcatttcactgccgtccggatactgcgccgagaaagggatggtgctcagcccgagcaggcactgaatcagcagaatgctcatgatgatgatgtccggcgcggtcgaggtggcgcgaacgcgctggttggtcagacgacgccagagcaaaccggcgccgccaatcagcgtcaggacgccgcagacgccgccgagcaccatcgccatctgctgcttgaccgcaatgggtaaaaaccaggcatacatccagtgcggcgttaacatgccgaacagatggccaaagaaaatgccgagtatgccgatatggaacagattcgaccagatcaccatcccgcgtttatccagcatctggctggaggaggcgcgccaggtgtactggccgtagtcatagcgcagccagctgccgagaaaaaagaccgtcgcgcagatgtaggggtagatgtcgtaaaaaaaagacgttcagatactgtatcatttcgggcctcccgcgctgacgtcgacgtactgcggcgccacgtcctggctaaagcgtcgttgatattgctgtaacggtgagctgtcacaggccgtggcgttgtcttcgataaatttcacctgttcttcttcccagaccgcatccagcgcctgccgggtgtcatcgcgggactcgttgttgacctgctgcgtgacactgtcacttgatagcgggatcccgccgaggctgagcagggcgtcaaacagctgataccaggggacaccgcgctgcttcagccgcccgcccagcagcgccagaatcggcgcgacgttttgcagaccttcgcgcgcttcgttttccggcaggatgctgaggtattccagatacagcggcaggtggtcgggaagctcgcgacagttgagcaccaggcccgccttttcatactgagcgagcaggtcgaccatcgcctgaccgcggtcgcgagactcggcgtgcacgtgttcaaacagcagtagcgacgtggcgcggccccggtcgaacacttcgcaccattcggcctgcttgtccagcagcggggcattcagcatctcagcggcgaagtcgttgagcacaggggcgtcgtgacgcaccatgctcagcacctcgtccttgcactgccaaagaaactcatccgggtactccatcagcaggccgatcgctttgaggatttgcattattcgccctccgctttatcgcgtacttcggtgatgttgatggcgtcaatgcggctactgttgaacaggttgaatttggtgtcggagccgtggcagccgtcgccgaaggtaaagccgcagccgttgcgctcggggaaggcgtcgcgcgccatttcgcggtggctggtcgggatcacgaagcggtcctcgtagttggcgatcgccagataacggtacatctcctcgacctgttcaacgctcaggcccacctcctcgatggcgcgagtatcggtgacgccttccaccgtttgcgagcgcatgtagtgacgcatcgccatcatgcgcttcagcgcgcgcagtaccgggccggtatcgcccgcgctgagcatattggcgagatactgcaccggaatgcgcaggctttcgatggccggaagcacgctgtcgcttttcggcagaccgccggcgtcggcgtaggactgaatcggcgacagcggcggcacgtaccagaccattggcagggtgcggtattccggatgcagcggcagcgccagcttccagtccatcgccattttgtacaccggcgagcgctgggcggcatcaatcacgttttgcggaatcccctgtttcagcgcttcttcaatcaccgccgggtcgtgggggttgaggaacacctcgcactgccgctcgtagaggtcggtttcgcgctcggtgctggcggcctcttcaatgcggtcggcgtcgtacaacagcacgccgaggtagcggatacgtcccacgcaggtttcggaacagacggtgggctgtccggactcgatacgcgggtagcagaagatgcacttctccgatttgccgcttttccagttgaagtagattttcttgtacgggcagccgctgatgcacagacgccagccgcggcatttgtcctggtcgatcagcacgatgccgtcttcttcacgcttgtagatggcgccgctggggcaggtggcgacgcagctcgggttcaggcagtgctcgcacaggcgcggcagatacatcatgaaggtattttcaaactggccgtacatctccttctgaatcttgtcgaagttacggtcgcgggcgcgcttttcaaactcgccgccgagcagctcttcccagttggggccccagataattttatccatccgcttgccgtcgataagcgaacgcggacgggcggtgggcaggtgttttccctccggcgcgttgtgcagatgctggtaatcaaaggtaaagggttcatagtagtcgtcgatctgcggtatcaccggattggcgaaaattttggtgatgacgcccattttgccgcccagacgcgggcgtattttgccattaacatcgcgcacccagccgccttcccacacctcctgatcttcccagtttttcggatagccgatgcccggtttggtttcgacgttgttaaaccaggcgtattccatcccttcgcgtccggtccagacgtttttacaggtgacggaacaggtgtgacagccgatgcatttatcgagattgagaaccataccgacctgtgaacgtattttcattttttcgcctcctgtaccccatcgcgaccttcgtcatccagccagtcaatatttttcattttgcggatcatgatgaactcgtcgcggttggagccgacggtgccgtagtagttgaaaccgtaagccaactgggcgtagccgccaatcatatgggtcggtttcgggcacacgcgggtgaccgagttatggatcccgccgcgccgtccggtgacttccgagcccggaatattcatcaggcgctcctgcgcgtggtacatcatggtcatccccggcggtacgcgctggctgaccaccgcgcgggcggtgagcgcgccgttggcgttgaaggcctcgatccagtcgttatcttcaatacccagctcgcgagcgtcggtttcgctgatccacacgatcggcccgccgcgcgacagggtcagcatcagcaggttttcgctgtaggtggagtggatgccccatttctggtgcggcgtcaggaaattgagcgctttttccgggaagccgttaggcggaatcgctttcatctggctgacgctgcgggtgtcaatgggcggacgataaaccaccaggctttcgccaaaggcgcgcatccaggggtgatcctgatacagctgctggcggccggaaagggtgcgccaggggatcagctcgtggacgttggtatagccggcgttgtaggaaacatgctcgctctcgaggccggaccaggtcgggctggagataattttgcgcggctgggcctgaatatcgcggaagcgaattttttcatcctctttattcagcgccaggtgcgtatgctcgcggccggtaaactcgccgagcgcttgccaggctttgaccgccacctggccgttggtttccggggcgagggcgaggatcacttccgaggcgtcaatggcgctgtcgatgcgcgggcgacctttggccgggccatcaagcttgacgtagttaagcttgccgaggaagtcgacctcgttctgggtgttccaggtgatgcctttaccgccgttgcccagtttgtcgagcagcggcccgagggaggtaaagcgctcatacgtcgccggataatcgcgctcaacgacggcaatcgacggcgcggttttacccggcgtcagctcgcattcccctttccgccagtccagcacgtcgaagggctgcgacagctccgccggggagtcgtgctgcagcggcaccagcacaacgtcggtctctttatcgaggtggccgacgcagacctcggagaaggttttggcgatatctttgtaaatttcccagtcgcttttcgcctcccacgccgggtcaacggcggcggagagcgggtggataaacggatgcatatccgaggtgttcatatcgtctttttcataccaggtggcggtcggcagaacgatatcggagaacaggcaggtactggacatgcggaaatcgagcgtcaccagcaggtcgagcttgccttcgatggccgcggtctgccactccacctcttcgggcttcacgtcatcgctggcgcccagctcatcgccctgaataccgctgtcggtgcccagcagatatttgagcatatactcgtggcccttgccggaggagcccagcaggttggagcgccagataaacagattacgtggatgatttttgccgttatccggctgttcgcaggcgaagcggatctcgccggacttcagcgcccgggcggtgtagtcggcgggggtcagtccggccgcggcggcctgcgccttgatggtcagcggattgacgcccagctgcggcgcggagggcagccagcccatgcgctcggcgcgtacgttaaagtcgatcagatggccgctgaattggctggcatcggccagcggcgacagcagctcccgggcggtcagcttttcatagcgccactggctggcgtgattgtaaaaaaaggaggtgctgttcatctggcgcggcggacgattccagtcaagggcgaacgccagcggcagccagccggtttgcggacgcagcttctcctgaccgacatagtgcgaccagccgccgccgctctggccgacgcagccgcagaataccagcatattgatcatcccccggtagttcatatccatgtggtaccagtggttgacgccggcgccgaggataatcatcgaccgtccgtgggttttatgcgcggtatcggcgaattcacgggcgatctgctcgatgtgctggcgcgggacgccggtaatctgttcggcccacgccggggtataggctttcatctcgctgaagtcctgcgcggcgttgggatcgtctaaaccgcgatcgagtccgtagttggcgagaatcagatcgtagacgctaaccaccaggccggattcaccgttggccagcgggagctgcttaaccggcagctgatgcagcgtcaccggatcctgcttgatgctgcgaaagtgcgggttttcgttgccgccgaagtagggaaagcccaccgtcaccacgtcgtcacggctatccagcagcgatagtttgagttcaatggcttgcccggcggcctgctgttcaaggttccatttgcctttctctccccagcggaagccaatcgaaccgttgggcgccaccagttcaccagcgctgttataggcgacggttttccactccgggttattgctttcgcccagcccgtcaaccagatcggcggcgcggaccatcctgccgggaacgtagaaaccctcctcgcgacgctcaagcatcaccagcatcggcatatcggtgtaggtgcggcagtagttgaggaaataatcgctcgggttatcaaggtgaaacgttttgaggatcgcgtggcccatcgccatggccagcgcgctgtcggtaccctgtttcggcgccagccactggtcgctgagcttggctacctccgaaaagtccggggtaatcgcgatggttttggtgcccttgtagcgcacttccgtaaagaagtgggcgtccggggttcgggtctgcgggacgttggagccccaggcgataatatagctggagttgtaccagtcggcggactcgggaacgtcggtctgctcgccccaggtcattggcgaggcggggggaaggtcgcagtaccagtcgtagaagctcaggcaggtgccgccgagcagcgacagataccgggtgccggcggcgtaagagaccatcgacatcgccgggatcggcgaaaagcccgccacgcggtccgggccgtagtttttgatggtccagacgttggcggcggcaatcagctggttcagctccttccagcttgaacggataaacccgcctttgccgcgtacctgcttgtagctgagggttttgaccgggtcctgcatgatgctgtcccacgcctgcaccgggtccgggtgctgagccagcgcttcgcgccatagcgcaatcagccgcttgcgcgccagcggatacttcaggcggttagcgctgtagaggtaccaggagtagcttgcgccgcgcgggcagccgcggggttcgtggttgggcaggtccgggcgggtgcgggggtagtccgtttgctgagtttcccaggtgaccagcccgtttttgacgtaaattttccagctgcaggagcctgtgcagttcacgccgtgcgttgagcggacgattttgtcgaactgccagcgctgacggtagctgtcttcccagtcgcggttggtgttgtacacctgaccgtggccgttggcaaagctctcgcctttctgcttaaagtagcgaaagcgatccagtagtttactcatgaccttcctcctgctccgataatgtccggcctgaaaagaccgtacgatccccaggccggatagggcgtcagccgccatccgatgaatatgccgttattgttttgccggtttacgacggccgtagaccagccaggtcaccagcacgcaaaccacgtagaaaaccaggaagaccttcatcgccccgaccggggagccggtcatcgccagcgaggtaccgaaggctttagggataaagaaaccaccaatcgcgccgatggcggagataaagccgagcgccgccgcggtgtcggtcaccgcttcgtgctgggcctgttcgtcgctgccgccgcgtttcttcacgctgtcgagggtgatttggcgaaagatcacggcgatcatctggaaggtggaaccgctgccgagaccggcggtcaggaacagccccataaacaccacgtaaaaggcgagaaaactgcctgagccgctgccggggagggtgagaaacagcaggccggtgaacagcgccatcagcacaaagttcaccagcgtgacccgtacgccgccgagacggtcggatataatcccgccgaaagaacgcgccagcgcgccgataaacggcccgaagaaggccagcttaaggatgttaacatcagggaactgcgttttcgccagcatggcgaaaccggcggagaagccgataaacgagccaaaggtggccaaatagagtaggctcagcagccacatatgcgggcgtttcagcaccggcagctgctcgcgaatcgaagcctttgagctggcgatgtcgttcattcctacccaggcggcgaaggtggctatcaccagcagcggaacccagacgagggcggcgttgctcagcgcgagaagagagccatcctcctgaggcacgccatggatgccaagaaaagcgaagatgggaagataaatcgccgccggcgcgatcatctgcatcacgctgacgccgagattgccgaggccgccgttgatacccagcgcgctgccctgtttcgctttgggaaagaaaaaactgatatttcccatgctggaagcaaagttcgcgccggcaaaaccgcacagcagggcaatggtgataaatacccagaatggagtagcggagttttgaatggcgacacccagccagatacagggcaccaccagaataatcgtgcttaataccgtccagtagcgcccgccaaatataggtaccataaaggagtaggggacgcgtaatattgcgccggaaagcgagggcagagcggttaataaaaagagctgatcggtggtgaaattaaatccgactttattgagattgacggcgacggcgctgaatagcatccagacgcaaaaggcgagtagcaaacaacctacggaaatgcaaagatttctgcgcgctatttgctttcccttattctcccaaaacgccgcattttctggtttccactcttttaaaagataatgattctttttctcatttttgctcagcatattgccctcgaatgaacagtaacccgtcaaaaaagaataaactggtaaaacagcaaattaataaaagaaataaaatcagggatggggatgtatctgttgtaataaatgaagaatagataagaaaagcgcgccgaaagaggacgcgcgaatattagctcaggattatttgttactaaatgtaacttaaaattaaaaaagttccatcgagatagaataattgatatgccgattgaaggcggcatcatctatttcctgcattcccagcgcataaataccgtcgaggccgcagacgagagcaatgagccgccaggcaatgctttccatatcgtcccctggcttaaactcaccggcagcggttccctggcggatgatcttcagggtctcttcatgccacatgttcatggtgagcagataggcccctttgatatcgctgtcgctatcggccagcagctgcgcttcgcgccacaggcgaatgtatggctcaagcctgccgtcgtcgctgcccaccatagaaaacaggcgttcacgccacgtggcgtcgtcggcgaccagcggcatatccatcatttcgcggatcaaccgtatgaaggcatgggcttttagctcgcccgcggaggtgaaatgatggtgcagctgaccggcggagacgccggcttcggcggcaatctggcggacggtcatagcgctaaacccgccccgaagcgctacgcgcatggctgccagcacaataacttcccgacgcgcatcgcgatttaagtagcccataacgttagtgaccccggtttttttggcgatagtaacaaaaagttggacactcgttcaacaatccggcaggatccgttttctggacgcttgtccagttttaacgttgagggaaagtagtatgtctcggcaatggttgacgctgatggcgattttgctggtttatattccggtggcgattgacgccactgttctccacgtggctgcgccaacgctcagcgtagcgctggggaccagcggtaacgagctgctgtggattattgatatttattcgctggtaatggccggtatggtgctgcctatgggcgcattgggcgataaaatcggctttaaacggctgctgctgctcggcagcggtatttttggcaccgcgtcgctggcggcggcgttttcgcccacggcagagacgctgattgcctcccgcgcgctgctggcggtgggggcggcgatgattgtgcctgcgaccctggccgggatccgcagcaccttttcgcaggcgcatcagcgtaatatggcgcttggtctgtgggcagcggtcggttccggcggcgcggcgttcggtccgctggttggcggcatgctgctggagcatttttactggggatcggttttcctgatcaacgtgccgatcgtcctgctggtgatagcgattaacgccaaagtggtgccgcgtcagcccgcgcggcgcgagcagccgctgaatcttttccaggcgctaatcctgatcgccgccattttgatgctggtctttagcgccaaaacggcgctcaaagggcaaatggcgctgtggttaaccgggctggtggcactatctggcgccgcgatgctgttctggttcgtgcgcaaacagctctcggcatcgcgtcccatggtcgatatgcgcctgtttacccatcgcattattttaagcggcgtgatgatggcgatgaccgcgctgattacgctggtgggttttgaactgctgatggcgcaggagctgcagtttgtgcacagcaaaacgccttttgaagccgggctgtttatgctgccggtgatggtggcgagcggtttcagcgggcccattgccggcatgctggtatcgcggctggggctgcgcgaggtcgccaccggcggaatgctgctcagcgccctgagcttcctcggcctgtcgatgaccgatttcagtactcagcagtggcaggcctggggactgatgacgctgctgggcttcagcgtcgccagcgcgctgttggcctccagctcggcgatcatggccgccgcgccgaaggaaaaagcggcggcggcaggggccatcgaaaccatggcctatgagctgggcgcgggactggggattgccctgtttggcctgatcctgacccgcagctacacctcgtcaattgttctgccgggtggaatcgagggcgcggcggcggagcaggcgtcgtcctccatcagcgaggcgattaagctggcgcagtcgctgcccgccataccggcgcaaagcctgcttgaagcggcgaaggcagcgtttattcattcgcacagcatcgtgctggcgacggctggcgtcctgcttctgctgctggcggccggcatctggcgtagtctggcaaaagcgcctgagctgaattaaccctttagacagccgactgccagatgattgaagacgtgcccatcccgggaattgccatcagggatgggctgaagtcagtcacggatcttgtaggccgttaaggcgtcggccgccgccgttttagcgccgggtcgcctgccagcaaagcagggagccggcgcacaccattccggcgccctgccagaatgaccacgacagcgcggcgctgagcagtgccgccgccagcgccgaggagagcaccggcgtaaagtaggaggcggcggccagcaggctgacgttgccgtgcaggatcccgacgttccacgccgcgtagcctaatcccagggcaacggacagcgcgatcagtttggctatcaccggccagctaaagaccatgggcggctgttcgctgaacaggaactttagccacagggtcagggcggtaagcagaacaaaaagggtaatcccgtttttgcccttcgcgtatttagcggtgaccgtgcagtaggccgcccagataaacgcgccgatgaacgccagaatatagctcagcgggctggaaaccacgttgcgggtaatttcatctacattcagaccatgctcaccgcctaatacccaggtgacgccgaataaagcgagaaataatcccggaataaccaaccagctgcttttttggccgttaaacagaatggcgaataaaatcgtcaggctgggccacagataattaaccatgcccacttcaatagcctgctggcggctaccggctaatccgaccgacagcgccaggcaaatttcatagctgacgaacagcaggctccctgccagtaaataggggcgagggatctggcgtatttgcgggaagccgacggtaaagatcagcaaaaggccgctcaggctgtagatcatcgccgcgccgcccaccggaccaagcccttcgcttacgccacgaatcagcccgaccatggtgctccacaagacgatagcggccaatccaatgagcgtggctctcttcttctccatatttaacctgatgttggttcaaacgcagtcgggttttataacacttttttttcgcttccgggggatattttccaccgtgcttaatcctaatggagtaacgaaattcaacgcggctgactattaaggggtcatgggttcaggacattgatttgacgcaaataaaacagggttattgctgttaatttccactcccgcaatgaataaacatcccgcatggaggggaacaatggacgtcagccgcagaaagttttttaaaatctgcgcaggcggtatggccggaacaacagccgctgcattgggttttgcgcccaaaatggccctggctcaggcgcgtaattacaaattgctgcgcgccaaagagatccgcaacacctgcacatactgctccgtgggctgcgggctattaatgtatagcctgggcgacggcgcgaaaaacgcgaaagaagcgatttaccacattgaaggtgacccggatcatccggtgagccgcggcgcgctgtgcccgaaaggcgcggggctgcttgactatgttcatagcgacaaccgcctgcgctatccgcagtaccgcgcgccgggttcggatacatggcagcgcatctcctgggatgacgcgtttacccgcatcgccaaactgatgaaagccgaccgcgacgccaattttattgaaaagaacgaacagggcgtgacggttaaccgctggctgtccaccgggatgttatgtgcctctgcggccagtaatgaaaccggcatgctgacgcaaaaatttgtgcgctccctcggcatgctggcggtagacaaccaggcgcgcgtctgacacggaccaacggtagcaagtcttgctccaacatttggtcgcggtgcgatgaccaaccactgggttgatatcaaaaacgctaacgtcgtggtggtgatgggcggtaacgccgccgaagcccatccggtgggattccgctgggcgatggaggcgaaaaacaacaacgatgcgacgctgattgtcgtcgacccgcgctttacgcgcacggcgtcggtggccgatatctatgcgcctattcgctccggcacggacattacgttcctgtcgggcgtgctgctgtacctgatcgaaaataacaaaatcaatgccgagtacgttaaacactacaccaacgccaacctgctggtgcgcgacgattttgccttcgaagatggcctgttcagcggctacgatgccgaaaagcgtcagtacgataaatcgtcgtggaactatcagttcgacgaaaacggctacgccatgcgcgacgagacgctgcagcatccgcgctgcgtctggaacctgctgaagcagcacgtttcgcgctatacgccggaggtggtggagaatatctgcggtacgccaaaggcggacttcctcaaagtgtgcgaagtgctggcgtcaaccagcgcggcggaccgaaccaccaccttcctttacgcgctgggctggacgcagcataccgtcggggcgcagaacatccgtaccatggcgatgattcagctgctgctcggcaatatggggatggcgggcggcggcgtcaacgcgctgcgcgggcactccaatattcaggggctaaccgatttaggcctgctctcgaccagcctgccgggctacctgacgctgccgtcggaacagcagacggatctgcaaagctatctcgccgccaatacgccgaaggcgacgctggccgaacaggtgaactactggagcaactatccgaagttcttcgtcagcctgatgaaatcgttctacggcgacgcggcgcaaaaagagaacgactggggcttccactggctgccgaaatgggaccaggcttacgacgttatcaaatatttcaatatgatggataacggtaacgtcacgggctatatctgccagggcttcaatccggtggcttcgttcccggacaaaaacaaggtggtccgcagcctgagcaagctgaagtacatggtggttatcgacccgctggtgaccgaaacgtcgaccttctggcaaaaccacggcgagtcgaacgatgttgacccggcggcgattcagaccgaagtgttccgcctgccgtccacctgcttcgccgaagaggatggttcaatcgccaactccgggcgctggctgcagtggcactggaaaggccaggacgcgccgggcgaagcgcgcaacgacggcgaaattctggccggcatttaccaccgtctgcgcgagctgtatcgcaccgagggcggcaaaggcgtcgagccgctgctgaagatggggtggcactacaagcagccggatcgtccggaatcagaagaggtcgcgaaagagaacaacggctacgcgctggcggatctcttcgacgctaacggcgcgccgctggcgaagaagggccagctgttgaacagcttcgcgctgctgcgcgatgacggtaccaccgcgtcgtcctgctggatctataccggcagctggaccgagcagggcaaccagatggccaaccgcgataacgccgatccgtcaggcctcggcaacacgctcggctgggcatgggcgtggccgctcaaccggcgcgtgctgtacaaccgcgcgtcggcggatattaacggcaagccgtgggatgcgaagcggatgctgatccagtggaacggcagcaagtgggttggcaacgatattccggacttcaataccgcgccgccgggcagcaaaaccgggccgtttattatgcagccggaaggactggggcgcctgtttgccctgaataagctggcggaaggtccgttcccggaacactacgagccgatggaaacgccgcttggcaccaacccgctgcacccgaacgtggtctccagcccggtggtgcgcctgtatgaagaggatgcccttcgtttaggtaagaaggataaattcccgtacgtcggcaccacctatcgcctgaccgagcattttcatacctggaccaagcatgcgctgctcaatgtgattgcgcagccggaacagtttgtcgaaatcagcgaaggtctggcgaaagcgaaggggattgccaacggcgatcgggtgacggtcagcagcaagcgcggctttattcgcgcggtagcggtggtgacgcgtcgtctgcaaacgctcaacgttaacggccagcaggtagaaaccgtcgggatcccgctgcactggggttttgaaggggtagcccgcaaaggttacatcgccaataccctgacgccaaacgtcggggattccaactcgcaaacgccggagtacaaggcgtttctggtcaacatcgagaaagcgtaaggagcgaatacatggcgatggaaacccaggacattatcaaacgctccgccaccaacccgatcacgcccgcgccgcgcgcgcgggattttaaagcggaagtggcgaagctgatcgatgtctcctcctgcgtaggctgtaaagcctgccaggtggcctgttccgagtggaacgatatccgcgatgaggttgggcactgcgtcggggtgtacgacaaccccgccgatctgagcgccaaatcctggacggtaatgcgctttagcgaaaccgaacagaacggcaagctggagtggctgatacgcaaagacggctgcatgcactgcgaggacccgggctgcctgaaggcgtgcccgtccgccggggcgattattcagtacgctaacggcatcgtcgactttcagcaggagaactgcatcggctgcggctactgcatcgccgggtgcccctttaacgtcccgcgcctcaataaagaggataaccgggtctataagtgcaccctgtgcgttgaccgggtcagcgtcggccaggaaccggcctgcgtgaaaacctgcccaaccggcgcgattcactgcggcagcaagaaagagatgctggaagtggccaacgagcgcgtggaaaagctgaagaaacgcggctatccccatgccggggtgtataacccgccgggcgtcggcggcacccacgtgatgtacgtgctgcatcatgcggaccagccggagctgtaccacaacctgccgaaagagccgcagatcgatacgtcgatcaacctgtggaaaggcgcgctgaagccgctctcggcggtcgggtttatcgccacctttgccgggctgatttatcactacatcgggattgggccgaataaagaagcggatgacgatgaggaggagcatgatgagtaaatcgaaaatgattgtgcgtacgaagtttattgaccgcgcctgtcactggacggtggtcatctgctttttcctggtggcgctatcggggatctcgtttttcttcccgacgctgcagtggctgaccgaaaccttcggtacgccgcagatggggcgaattctgcatccgttcttcggggtactgattttcgtggctctgatgtttatgtttgtgcgttttgtccatcacaatattcccgacaagcaggatatcccctggctaaagggcattattgaggtactgaaaggcaacgagcataaagtggcgcgggtagggaaatataacgcggggcagaaaatgatgttctggaccatcatgagcatgatttttgtgctgctggtgaccggcgtgattatctggcggccctggtttgcccactatttcccgattcaggttattcgctatagcctgctgattcacgcgacctcggcgattattcttattcatgcgattctgatccacatgtatatggcgttttgggtgaagggatcgattaaaggcatgatcgaagggaaggtgagtcgccgctgggcgaagaagcatcatccgcgctggtatcgcgaggtggagcgtcaggaagcgaagaaagagagctgtgaagggctgaagtaagcgtaactgagcaacccgctctggctgaagccggagcggatcggctattggtaacaagggcgtcaatggcggaaataacttcgcctctggcgctttttaagttacagataaaatcttcgcgcttgatcggcttattattaaggtttgtcatcatcggcgaacaaagcataaacgtttaaaattcaatatttacctcaggaactaaaggatgctgccatagtggcagatgaccattacgcatcaggggaataattaccctggtgggtaggtcttcataaaaatcattttgcacaatcataaaatagggtagagagtgcttcgtttgcgaagaagggttccgatacacgtcgaattgtttaagcatcagagcaccctgaagtattcatcttcggtgatggacccatgctcgtcgacgaattcattcattaaccggatcaactcgttactgggatgaattgactgactttcagctgtgggtatcgaggataaacggtgctttttgctcgttgatatcgcctgctggaagctatcatccgctgtgtactctttcattatcctgcctccgtgtggttaatgtcgccattatcaacctactacctaaaaaaacaatacagattgtcctggttaagtcgcatttgcgagacaggttccattgaaaagcaacggcatgaaatgatgaaatttttatggaaccgcggttgtgaattgttatcgctatgccgttgctggcgaccgggcagcggcggggcacgaaatggctttattggtttttttaatctgcaaataagcctatgaaataatcacgccgttttatggataaatatgccacccggcgtttttatctggtctgccgtttaataatgcacaataatgccggcggtatgttttataacaagtgattagttgtatgaaaaagactattttttcgttagcgcttggcacttttggtctcggaatggcggaatttggcatcatgggcgtattacctgaaattgcccatgacgtcgggatatctattcccgccgcgggcaatatgatctcctggtatgcgcttggcgtcgtcatcggcgcgccggtgatggcgctgttctccagccgcttttcgttaaaagcggtgatgctgttcctcgtggcgctgtgcgttatcggcaatgccatctttacgttatcttccagctattcgatgctggcgctggggcgcctgatctccggtttcccgcacggcgccttctttggcgtgggggcgatcgttctgtcgaaaattgcgccgccggggaaggtcaccgccgcggtggcgggaatgattgccggaatgacggtcgctaatttgctgggggttcccgccggaacctggcttggccatcagtttagctggcgctatacctttctggcgattgcggtgtttgacatcgccgtgctggtcgccatcgcctggtgggtgcccacgctgtttgataaaccgacgacgcgcttgcgctcgcagtttcattttttaacatcgcccgcaccgtggttaatttttgccgcgacgatgttcggcaatgccggcgtattcgcgtggtttagctatattaagccgtttatgattaacgtctctggttttggtgagagcgccatcatagccattatgctgctggcggggctggggatggttctggggaatttatttagcggtaaagtctccgtccgttatagcccgttacgcattgccgccgtgacggatggcgtgattgtcgtgaccttattacttctgttcctgctgggtgagaataaagccgccgcattaaccctcgcgtttatttgctgcgcggccctgtttgccctgtcggcaccgctgcaaattctgctgctgcaaaatgcgaagggcggcgagatgctgggcgcggcgggcggccagatcgcctttaatctcggcagcgccattggggcgctattcggcgggatgatgattacggccggtcctggctggcgtttcgttgccttaccggccgcgctgctttcgtttcttgcgctcagttcgctgctgatttatgcccgccatcagcggcgtctggcctgattaagcccgctggcagctattcctgccacggctcgccgagggtcagcattaaccggttggcccaggcaaagaaagccgccgattgcagtaaatccagttgggcgagggtatccagcccctgttgctcgacggcggcaaggtggtcaacggacagagcgggaggggtaacggaaatcgcggcggcgaaatcgatctgcgcctgccatcccggcgtctgcccgtcgcttaactgctctcccggcgtcaccgccagcagcgtctctatcgccgtttcatctttggccagctgtgccgctttgcgcgcatgcaccgaggcgcaataaatacagccgttgattttgcttgccactgtcgccgccagctcgcgctcggcgcgcggcaggccgccgggagtataaaagatccctttgtcggttaacgtacgctgctcgaggagcggcaggttgcgcgccagcaggcggaagtagggcgagtcgctgtggccgaatttcgccagcagcgcctgctcgtcgggggtaaattccgccagcggtttagccgccagccagggctcccagtgcagttcatcgcgggtgaagtgcaccggcgccttcttaccgctgatggtttgcggcgaggtatgccagaatcccgccaccgttggggtttgtgcgacgtggatatttttgccgttaagcaggcgcagcccgacgaccagccggctctggaagctgacaaacgcgataagctgggcgagggtgacgatgccgcgcaggctccatccggcgcggattaaggcctcaagcgccgacggcgtggcctccacgggcgtaaaggtcaacagccgggcaaaggccagcgccggcgccagccgcggcgatgtggggtcggcaatgccaaagccggcgtagtgggcggccagcgcatcgctctcatgcagcttcgccacccgcgcggccacggcaaaacgctcgtcgagcggaaagtcgttatcctgctgaccaaacagcgtttcataacttccctgagcatggcgggtggccgcctcgcgcacggctcgcgccgccgctaaggcggaatcgggggcaatttctgccagttcggccaatatatcctgactgagcgtcatggtgactccttatcgtatctgcggggcaatatgctgagcgatcagctcaatggaacgaagcgtgtcgcggtgcgagggttcaacggagtgcacctgaaacgaaatatcggttacccgccgcaggacgctatcgcgggccagcgaagcggcgacgtgctgcgggtcgccaacgtgcgcgtcaagctgcggcaaaaaatcagtgacagtgtcaccaataatatcatgacctgcggcgcgatgctgggcagcctgctggcgcaggccgggttcagcgacctgcagcgcataccgctggctatcggcgacaaaggccgtccgcgaggcgaggatccttggctcgacgcccgccggcagcgcggcgagataggcgtcaataatcggattctggatagcgtccagcggcagcgtgggctgtccagccggacgcggctgcgtgcgcgagagcatcagcccgtgcccggcctgagccgcgcgaaccgccccctcaatggaaaaggtggcaatccagatgcgctccgccagctgcggcgcctgagggtacagatgattatccgggtgcgagagcgaatccccgcgccaggcgctttgaatcagatgcaggtgttcggcaaataccgcgctgcgctggtccatcgtcagcccgaagggtaaaaacgaagtgggggtgccgccggagccgaagcccacctccagccgtccatcggcgagcagatccagcaccgccgcatcctccgccacccgcagcgggttttccatgggcagggtgataatggcggtgccaagacgaatgcgctcggtgtgcgccgcggcgtgggcgagaaagaccagcggcgacggcaggccgccttcgtgctcatgaaaatggtgctgagcgatccacgcgctgtcgaatcccaggcgttccgcgtggcgaatttgctcggtggccagccggtagcgctctttaggcgtggcgtggtccagcagacgggtgaaaaagcccagtcgtttacgcgtcatgcaacctccttgctcggggatgaaaaatggggaatcgcggcgataagctcgcgggtatagtcatgctgcggggcgctgaacagtcggctgacgtcgccgtgttcaaccacctggcccgcccgcagcaccgtcacgctgtgggcgatacggcgcaccgtcgccaaatcgtgagtgataaacagatagctcagccccagctgctgctgaagctgctgcagcagcgcgagaatttgcgcctgcacagtgacgtccagcgccgaagtcgcttcatcgaggacaaggatcgtcggttcaaggattaaggcgcgggcgatggccacccgctgccgctggccgccggaaagctcacgggcggttcgcgacagcagctccggagcgagcgccacgcgggcggcgaccgtttcgacgcgctggcgccgcacttcggcgttgaggcggtcgaagttttttaacggctcttcgataatctcaaacagcgtttgccgcgggtcaagcgaggcaaaaggattctggtaaacgaactgaattttacgccgcagctggcggagcgcctcgcggctgagatgcccggcatcgataccgtcgatagcgatatggccgctatcggccttttcgaatcccagcaggatccgcgcaagggtcgttttgccggagccggactcgccgaccagcgcgtgggtgctgccgcgcttcacctcgaagctcacggcgtccagcgcctgcaaatgcgcgcggcctaatgagaagcgcttgctgatgccctccacgcggatcgccggggtcgccagtacgcgcccgctggccggggcaatggtcagcgtcgaaccctggagatcgctcagcagctggcgggtataggtatgctgcggcgtacgtatgacgtcgccggtcgcgccctgttcctgaatctcgccgtggcgaaagaccagcagacggtcggcgcgttccgccgccagcgccagatcgtgggtgacgaacagtaccgccgtgccggactcccggcgcagcgtatccagcaggtcgaggatccgcttctgtaccgtcacgtcgagggcgctggtgggctcatcggcaatgattaagtcgggtttcagggcgattgcgatagcaatcagcacccgctgcttcataccgcctgaaagctggtggggatattgatcgatgcgctgttccgggtggctcagcccaactttggtcagcagcgccagcacctgcgctttacgcgccgcggcgctgcttttttgatgcagacgcaggatttcgcccacctgcgcgccgatggtttttaccggattcagggagttgcccggatcctgaggcaccaggctaatccgcgcgccgcgcagaccgtcgaggcgtttagcggaccagccgctgatatcttcgccattaatcaagatacgcccgctgtcccggcgcgcgttatccgccagcaggccaataatcgcctgtgcggtggtggttttacccgagccggattcaccgacaaacgccagcatttcgccgcgtttgacctgaaaactcacgtcgtgcacgacctcgcgccattcacgctgtgaacgatagctgatgcgcagatgctctacgcttaaaacattcatcggcgttctccgctaaattgacggctaatacggttggcggcgagcacgaccgcaatcaccgcaataccgggcagggtggtcagccaccaggcggtggagagatagttgcggccttcggcgatcagcagaccccactccgggaccggcggcggcgtgccgtagccgagaaaactcagggtcgagagcgccagaatggcctggccgaactggagggtggcaaaggccagcaccgcggtgagcgagttgggcagaatatgccgccagaaaacggcgaaaaaggtgccgccgctgccgtaggccgcttcgacgaagtcgctgtggcgtacgcggaccacctccgctcgcgccaggcgggcaaagctggcgacggccgccgcgcctaccgcgacggcggcgttgagcgtgccgaaaccgagcagaatgatgaccgtcagcgacagcaataaagaggggatcgccagcagcacgtcgaccaggcgcataattgccgactccacgcgtcccgccagcgcgccggccagcgtgcccagcgcggtaccgataaacaggccgatcgccaccgccgccagcgcggcggaaagcgaatgaacggcgccgaagacgatgcggctccacagatcgcggcccagctggtcggttcccagccagtggccggcctgcggggccagccgctgggcgccggggaacccttccagcgggctatagtcggtaaacagctgcggagcgatagccatcagcgcggcaacgatcattaccgcccaggccagcagcagaccgggctggacgcgccgtgtacgccagtttgacgtgcggcggcgcgcggcggttgcgtaatccaccaggctcatacggcacctccgataacggctttcaggcgcgggtcgaacagcggcatcagcaggtcgaccagcaggttaatcagcacgaaaccgagggcagagatcatcaccaccgcctgcagtaccgcgatatcctgattattgacggcctgctgcgtcagcagccccagaccgccgcggccaaacacggtttcggtaatcagcgcgccggcgatcagttcccccagcagcagaccggcgatattgagcaccggcagcagggcgttgccggtaacgtgccgccacagggcgccggtttcgctcaggcctttggcgcgggcaacggcgacaaacggctgcgcggcgacctgatccagactgcgcatcaggatttgcgccagcggagcggaaatcggcaccgcgacggcaataatgggcaaaatcagcccctcaatcggcccgggattgatcaccgggatccagcgcagttgaaaggagaaaatctgaatcagggcgatgccgagccagaacgtcggcagcgagataaacagcgccggcagggattgcagcgcgttgctgaaccagcgcaggcccggcagccgtgaggcgaaggcgagggcgaaggccagcgccaccgccagagcaaaggcgggcagcgccaggcttaatgtttccggcaggttgctggcgataagcgcgctgaccggcagcccggcctgcagcgaatagccaaaatcgccacgcagcatggccatcagcgtgtggaagtactgtctccacagcgggctatcggccccgtaggcgaggcgcatttcggcgatctgctcagggctgagccccagatccggattctgaaacttgatcagtaccgcatcgccgggtagcacctgtaacaggatgaaggagagggtaaacgcggcccacagcaccagtaaaccctgaccggaccgccgcagaagatagtggctcatcgcgggctccttagtgcttttccagccacgcgccgtagaacgacgggcggcctaccgcttcaaaactgacgcctttcacccacggcgcgccggcaaagacctgcggctcttcaaatatcgggatcacgtaggcgttgtccagcaggtagcgctgggcgtcgccggtgagctggaggcgtttttgcggctcgacttcggctgagatcgcggtcagcagcgcgttgagcttatcgtcgcggaagcgttggactttgtcgctggagccgcctttttgcagcagcgcgtcgcggttagcggggaagaacatgcttttcaccacgtcagggtcggcgcggcccacttccgacacggtaagcggcgttttcaacgggtcgaggctgtccagcgtacggctgccggcatcaccggctttgaccgccagcgcaacgccgacctggcgccactgctgggcgacaagctggagtacctctttgttttgcggctggggcagggattcatagacggttaatgccaggcgctggccatctttgacccgtataccgtcggcggccggtttccagcccgcctcatcaagcagctgtttcgctttggccggatcgaaaaccagcttatcgctgaggttaacgtatccggccgcggtgctggcgacgacggaggtcgcctgcggatagttggcggagaacagggtttcaaccacctgtctggcgtcggtggcgtgcagcagcgcctgacgaacgcgcaggtcggcaaccagcggattatccgggcggaagctcaggctgtcgttaacgccgcgcgtcggggcggcatagattttaaagccccgatcggttgcctgcttttcatcataggcctgcacctggcgaataaaatcggcctggcctgccagcagcgcgccaacgcgtacgccatcttccggggtgacgatataggttatgccgtcgagattcgctggcccctgctgggcgaggcttttcggcccccattgataatcctgacgtgcgaccagagcgagttcacgtcccggcttttcatctttaaccgtaaaaggcccggagccaataatatggcgggcgtcgcccagctcttcaaaatttcgcgccagggtgctcagggaaaccagcccggagccgatggtcgcggtgccctgcagaaatcccggcgagggctttttaaagtagaacttaaccgtcagcggatcgatgacttcgctgcgatcgtagttattaatcacctcggacaccggcaggcggtgcgctttattaccgaggccgtaggtatcaaagtttttggcaaccgcattggcgtcaagcggggtgccatcagaaaaggtgacgccagggcgaatcttaaaggtatattcggttttatccgcgttggcgctccagctttcggcaatccacggttcgacttgtaaggtttttggattttgccaggtcagcttatcggttatttgattaagaataccgccgttagggtaaaagcctccggccgggggataaagattggtatgcggctgctgctccagataaattaacgtgccgcctttaaccggcgcgtcggcggcccacgcggaaaacgcgccgctcaaaaaaaatgccgccagcgcgggcaggcgaaaacgggtgtgcatggtgaattcctttgttatctcttgtttggccatcatcgggcgcgcgttttaacaaaggaagtaaggatttgcgctaagcatttgcataaaaagcatttatacccggctcgatttttaggggctggtatttacatgcctttcagctgaaactcgtgctggataatttaatgactgagagatagtcagcgtaataaagggatagcgacgatgctgaagtatttactgatgttggcgatgacggtgctggcgggctgtaccagcgcacccaatttgccctctactgataccattattaaggttaaacctattgagtcaggcatcattgccaattcaaacaaatacagctatcgattcttccgtaaaggggtgccgcaggagtaccagcgttataatactttctacgaacgcttcaataaggtcgcatccggcgtacgggtgaattttgtcgtgaaacagcatgaggttgttgcggaatatctggtggtgctcgacaagcgcagactggatgccagtcagctaagtctgttaaccagccagtatcacgcgaccgcgctggacaacgaccatcttggcgtactgtttaaagcgaccggtttctggtcaaccgttgatcccaatgagctggatgacgcttatcgccttgccagacccgtcgtcgtgtcaattaacgataaaacgcagaccattagccctctgggagagatcgccctgattccgctggtgccgctatttcctctggtgatgatgtacggttgcgcaacggggccgtgcgtgtaaagggacaattaaacctctcccgtagcgggagaggtccgaagattagcggcggaaatcaatgaccatacggccgcgaatctgtccctgttccatctctttgaagatggcgttgatatcgcccagcggacgcagggtcactttcggtacgactttcccttccgcggcaaactggaaggcttcggtcaggtcctgacgggtaccgaccagcgaacccaccacttcgataccgtcgaggaccagacgcggaatgtccaggctcatcgcttccggaggcaggcctaccgccaccacgcgtccacccgcgcgaaccgcatccaccgctgagttaaacgccgctttggcgacggcggttaccaccgcggcatgcgcgccgccggttttctcatgaataattttggctgcgtcttcgctgcgggagttgatggtcaggtccgcgcccatttccgcggccagcttcagctgttcatcattaacgtcaagggcgatgactttggcgttaaacacgtttttggcatactgcagcgccagattgccgaggccgccgaggccataaatggcaatccactggccgggtttgatatgtgagactttgaccgctttataggtggtgacgcccgcgcaggtgatgctgctggccgccgcagaatcgagcccgtccggcactttgaccgcgtagtcggccatgacgatacactcttccgccataccgccatccacggtatagccggcatttttcaccgagcgacacagcgtttcgttgccgctgttacaatattcacaatgcccgcagccttcgaagaaccacgccacgctggcgcgatcgcccggcttcagagaatgaacgccggggccgacctgctgcacaacgcccacgccttcatggcccagaatgaccccggttttatcgccaaagtcgccgttcttaacgtgcaggtcggtgtgacatacgccgcagcaatccatttttaaaagggcttcgccatgttgcaggggacgaagcgttttttccgtaacattgacctgatgatcttgcgtgacgacagcagctttcattctgttctccttattgaacataagcgtattaacacaattttgttttttacgcatgctaaggtttagcttaaatcttcattaaatcaagggaataatagatattccttgccggggtgagcttggtgcgccgattttttaatcagaattattaatgaaattcgcgtcacatcactgtcatcgttacgtcatgcacgcttcatttgcggcctctatcgttctgtttttcaatttcttataacgatagagcgacacgacaatgcatctggtaaaaacactccttgcctcaggccttctgctttccgctaccgttcaggcgcagaacgtactggatttcccgcagccgaaaaacaaccctgaagagttttatgccgtgaccgaaattcccgcgggcggcattatcaaatatgaaaccgacgccaaaaccggctttttgatcgccgatcgtttccagtcaatgccggtggcctatccggctaactacggttcgctgacgcaatccctggcaggggatggcgatccgctggacgtggtgttttacacccgcgcgccgatggcgccgggaacgctgattaagctgcgcgcgattggcgtgctcaagatgattgatggcggcgagaaggacgacaaaatcattgccgttccggcaagcaaaatcgacccaacctacgatgacatcaacaccatcggcgatctgccgaaaatcgagcaggagcgtttgcaggctttcttccgcgtttacaaacagctgccggaagggcgtaaaaaagtggagctgaacggctttaacgatgccgccgccgcgaagcaggaaattaaagcggcatgggatgcctggaaagagaaaaatccgcaataagcggaaaaacaggcatcgcccggtgcctgtcgctttttcttcgccttattctccgcagagcgaggtaatacgggggactacgccggaaccgccgaaatttccgttaccctgcgtccttttcttcagccccagcgtggcgacgatgcgctcgaaattgcttttttcacgggtaataagtccaggtcaatctcactgctgacgttgtctcatatcactggtacgatataaatctctttcacggcccttatacgtacatatttatgacagaaatacgcattggctatgcccgatgttcaactgaccgccaggatctggctcaggcggcagttcgccagggagacacgctggtcgtaccgaaactggacaggctggcccgttcagttccggatgcaagagatattgctgatgcccttcaggcccgtggcgtgaagctggcgctgggcaacaggataatgagattgcagacatcatcaccaggatgattcgataataatgatgagtcttattaaaaggtttttcagacggatattctggtcattgatatcgatgtacggtcctgccttattgacacttttatttgcaattgtcctttttcaaattttccctgatggaccaatatggcctgtccccatattctgcatttttgtgatcgttgttttttatcgatacgtgaaatggtaatcatcaaaacatcaaattttagcattgtttgaaatttatttataaggaaatgctatgtctacacccgcacatggtaccaagggaggccattgcctcacttggctctgacgaggagataaaatgatcgacttaaccgccaggattgatatcgttaccggctatcgtccgggaatgattggccgcattacgcagatgcacggcgagtactatgcgaagcattatgaatttggtcactttttcgagagcaaagtggccagcgggctagcggagttttccggtcgtcttgagaaaccgtgcaaccgggtttggcttgccattcagggtgagcagattgtcggatcggtggcgattgacggcgaagatcttggtaataatgaagcgcatctgcgctggtttatcctcgacgatagctgccggggaagcggcgttggccgacgtctgctgaatgaatcgatggccttttgcgatagccagaacttcgccgcggtgcggctgtggaccttcagcgggctgaacgccgcccgcaggctgtatgaatcctttggctttacgctggataaagcgtggcagggggatcagtgggggcggatgatgaccgagcagcagtttagtcgggtcaaaccggcttcgcctgccggcgcggaataatctcccggcgcggatcgccgcgccgggagagcgcctgttaacctaataacgtcgcaatcgttgttatctccttacgccactgcgcctgcagctgcggtttttgatgttttggtttgcgcgccagatcgtcggccagcagctgctcaagcgtgactaaccgctccagcagcgcatcctggtcctcctccggttcgctactgttcaccgtcgcggcctgcgtcgccggacgacgaacggcggtgcgcaaaatctcatacacctcttcgctgctgtgccattcgctcagcccgcgctcgtcgataagccagaagcgattgcagctgcggttaatgagctcgcgatcgtggctcaccagcagcaggccgccgggatagtcgcgcagcgtagccgccagcgccgttttgccatccatatctaaatggttggtgggctcatccagcagcagcaggctatagcgggccagagagaggccgacgaacagcaggcgcgaacgctcgccgccgcttaaggtggcgaccttttgcccgtgacgcggccagttgaatccggcggaaattagcgcccgcctgcgcgcatccgggcctggttcaaagggctccagcgcgtcgagaagggtatcgtcatccgccagctgatgcagggtctggtcgtaataacccggcttcagccgcggatgcaggcgcaaaccgctttccgtcgtttcctgctgcatttgccgccacagcagacgcagcagcgaagacttgccgccgccgttacggcccatcaccgccacccgatcgccgcttttcaggcgagccaggcccgcggtaaacagggccggcagaccgggcgcggggggaacggggagctgttccatctccagcagtcggtcagcccgcagcatgtcgccgtggagcgccagccgccagggggtgcccatggtcagctcggtttggctctccttcaggcgttgaacctgcttctccatctgcttggctttgcgggagagatcttcgttgtcataggtccgaccccagatagccagccgtttggcgctggcggcgacccggtcgatctccttttgctcggctttatggcgctgcgcatcgctggcgtcctgctcttccagcgcccggcgggcggcgctgcagggcagggagaaggcgtgcagcgttctgtcgcgcaggatccaactggaattagttacagcatccaataagatattatcatgcgacaccagaacgaagctcccctgccaggtttgcaggaagctttccagccacaggagggtcggcaggtcgagatggtttcccggctcatccagcagcaggagatccggctgcagaatcagcgccctggcaagcagcagccgggtatgctgaccgccgctcagggttgacgcccgctgcgcggcctcatctggtgtaaagcccatctctgccaatagcctctccgcttgccagcgctgactctcacgctcaggggcgggaagtttcgccagtactacctgcagcaggggctgcgctaacagcgcatcgggtagatgctgttccacacgcgccatcagacagtgactggccagcgccacgcagcccgaactgggcacgatcgtgccgtccagcacctgtagcagggtactttttccgcagccgttatagccaatcaggccaatacggtcgccttttttcagggtaaaggagaggtttgtgaacagcgggccaaacgccgtatcaacatgaagagattgtgcagttagtaatgtgctcattgtgaacttactcaagagttacaggcatgtgaatgcctcgtcaaacatcgctgacgataacccggtaagcccgagggaagggagttagtctatggtttcttcgctcaagctgaagttatcgcagcacgataccgataacgcttgagcaggtgcgatcgccaaatgcacgtgaaaaaaacatttcacagtacgacatgggatcctccttttttattcagtgagttgatgggtgctggcagtgtagagggagaaagcggttttgaccagatgagaataaaaaaaggcctgcaaagcaggccccctgtatgactcatctaccggttaaatcgacgtgcggcggtagttccggtactccggctgccagaagttatcggcgatcgcctgcagcaacgcttcggcggaggttttcaccgccacgccctgttcctgggcgattttgcccaccgcaaacgcgatagcgcgtgaaacgctctgaatatccttcagctccggcagaaccgggccttcaccgttattcaccagcggcgaatgtttcgccagggtttcgctggcggccatcagcatctcatcggtcacgcgcgatgcgcccgaagcgataacgccgaggccaattcccgggaagatataggagttattgcactgggcgataacgtactgtttgcctttgagggtgaccggggcaaacgggctgccggtggcgaccagcgccgcgccgtcggtccagctgaggatattctgcggcgtggcttccacccgggaggtcgggttggacagcggcatcacgattggccgcgggcagtgcttgtgcatctcgcggataatctcttcggtgaacagccccggctgcccggaaacgccgatcaggatatccggtttgacgttgcgcaccacgtcgagcagcgacagcacatcattcgtggtgtcccacgcttgcaggtgctcacgcttttgcaccagtttgctctggaacggcagcaggttcggcatggcgtcggtcagcagaccgaaacggtcaaccataaagacacgtttacgggcttcctcttcgcttaacccttcgcgctggatttgcgcgacgatctgctctgcgataccgcagcccgcggagccggcgccgaggaagacaattttctgctcgctcagctggctgcccgcgccgcggctggcggcgatcagcgtaccgacggtgaccgaagcggttccctggatatcatcgttaaaggagcacacttcgtggcgatagcggttgagcaggggcatggcgtttttctgcgcgaagtcttcgaactgcagcagtacgtccggccagcgggctttaatcgcctggataacgtcgtcgacaaactgatagtactcgtcgtcggtgatgcgcgggtggcgccagcccatatacagcggatcgtccagcagctgctggttgttagtaccgacgtccagcaccaccggcagcgtgtaggccgggctgataccgccgcaggtggtatacagcgacagtttgccgataggaatgcccatcccgccgataccctggtcaccgaggccgagaatacgttcgccgtcggtcatcacgataaccttgacgttgtggttcggtacgttttgcagaatatcgtcgaggttattgcggttctgataagagataaacacgccgcgggcgcgacgatagatctcagagaagcgttcacaggcggcgccgacggttggggtgtagataaccggcatcatttcgtcaaggtggttgccgaccaggcggtagaacagcgtttcgttggtatcctggatattgcgcaggtagatgtgcttgtcgatctcggttttaaatccctggtactggatccacgcgcgttcggcctgttcttcgatggtttcgaccacttccggcagcaggcccagcaggttgaagctgctgcgctcttccatgctgaaggcgctgcctttattgagcagcggaaattcaagcagcacggggccggcgtaagggatgtatagagagcggtttttcttatgagtgaattgcatcgcactaactccttgataatcgcttcagcccgggcgcggcgacaggcggggggctggcagggaatggcagcgggcagagtataaagcagaagacatcaaaggagggtaaacatgaggccgatagtcttaaaaaaacaccatcccggggagaggacggtgtttttatcatcattcagctgaaaagttagccaccgcggcgcttgcggccggtggcgcgaacatggttaaccgtggtttccgcatcgccttccagcagcacttttttctgctgagaaagcttgtagttcagaccaagaagatgacgtgcctgttggttcgatttcattcttactcctttatcctgtgtcggtttcaaggacaagcccgacgggtgtcggacgaaatttaacccttaagtacgccgcgcatttttagcgcggcgataatcatcgtggcccattttgccgggattagcaacgttgagtcggcagattaagaacagtctttttagcggaccccggttcgtcggccggacaggaggtcacccgccatccggcagaaagacccgcacgttagccagtcttaccacttcatttcgccggtattcactttggcgctcagatccagcgaactctcttccgcgagtcccggccagcgctgtttcatcgctttgataacgccggtggaatctttgtgcgcgttgagcgcctgctcgaactgggtcagataatcgcgggtaaaggtaatcgcgcggtcgcctgcgggcggagtccccaggtaatggccggggatcacctgctgcggatgcaacgcggccatctcgtcgagcgtacttatccactgctggcggctttcgacgctctgggtatccgccgtccagacgtgcatgccccacgccacgccggtcccgccaagaatggctttattcgccgggatccagacataggcggcataattttgcggctggcggatctcaaccttttcgccgtcgatggtgaaggtgtttgccgtcagcgcttgcgggacgtaaacctgcttcggcgcgccgtccttcatctgcgggccccagtaggccagtttggccgctttggtggcgttaatgtgtttaaccacttccgcggtcgccaccacgttgacatccgggaaagccttcaccagcggctcgaggccgaaatagaagtccggatcgccggaggtaatcacgatgcgggtcagttttttaccgcttttcttaatcatttcaaccagcttctcgccatctttgacgctgaattgagcgtcaaacagcaccgcttcatgcgggccggaggcgagggtggagttaaccgcgaaaatgccgttctcctgcgggttgtaggtttgcagcgttaggggcgcggccagaactgacgtgctgaacagcgtggttgcgatagcaagggcagataatttcatattcgttttctcttggtcaggtgaatgagcgctattgtacggatttcatgatttgcgaaaattcctgaaaaaagagatgctgagtttcataaaacgtgcagatggaaatcagttatggatcgggtaattgccgcgcaggtgtatatgcgcatttgtgaactggggagcttaagcgccgccgcccgcgcgctggggatgtcgcgtccgatggtcagccgctatctggaacagatggagcagtgggcgggaacccggctggtccatcgctcaacccgcaaactgacgctcacggctgcgggggaaaaggtgctgcaaaaaacgcgcaccctgacgcagctgtcggatgagatcgccgggcaaagcgagcgtgcgatccccagcgggacgctgcgcgtcgcctgcgctcactttacggcgatgcagctgatttcgccgctgctacccgattttctcgcccgttatccgcagctgcgccttgagctggatatcaataatcacccggtcagcctgatcggcgaacggatcgacgtggcgattcggatcaccgacaatccggagcccggggctatcgcccgccgccttggcgtgtgtcgttcggtgctgtgcgcgtcgccgcgctggcttcagcagaacggtccgctgcaaacgccggaagatctcactcgtcacaactgcctgcattacagccattttgccagccagacctggcagtttagcgacgtcagcggcgaaaacgtggcggtggcggtttccggcaaccttagcgccgggatctcctcgctgctgatggaggcggcggtcgccggctgcggcatcgcgatgctgccggagctggaggcgcagcgggcgctcaacagcggggcgctgaaacaggttttaccggcctggcggccaaaagcgctaagcgtatatggtatttacctttcacgggactatcagccaagcgcgctgccgctgtttctcggtgagatacagcagaaactggcgcaaactcacgatataaaaggaaccctttaatgatagtgcttcgcccaatgcgcgatacggagtaccccgcgtatctcgactactttatccccgactacgcggcggaaatctccgccaattacgcgctctcgccggtggccgcgttagcccaggcgcagcgcgaaatcgccgcggatctgcccgacggcgtcaatactcgcggccaggttttatgctgcttattcgatgacagtgacggcgcagaaaagcgggtcggctatctctggtacaagcctgacgaagaaatgcgctccgcctttatctgcgatttttatatttatccggcgtttcagggacagggcctgggtaaacaagcgatggcggcttttgagcatgcgctgaaaagccaggggatcggccaaattaaactgcgcgtcgccggggataatcagcgcgcgcgccatctctacgacgccgcgggtttccgcgttaccggcgttaatatgagtaaaaatatcccgacggattgatctgaaaaacgccgcgcgccgcccaaatgccttagggggttctatacttaactctttcatatcaaaaaaggagcgatattatggcaatccataagaaaggtcaggcgcattgggaaggggatctgaaaagcggaaaaggaaccgtctcgaccgagagcggcgcactgaaccagcagccttatggttttaacactcgtttcgaaggcgtcaagggcaccaatccggaagagcttatcggggccgcccatgccgcctgtttctccatggcgctctcgctgatgctgagcgaagagggctacaccgccacctccattgataccgtggcggtggtgacgctggataagtccggcggcggctttgccatcacccaaatcgcgctgcagagtaaaattgtgctgccaggcatcgaggccgatgcgtttgacggcatcattcaaaaagccaaagccggttgcccggtgtcgcaggtgctgaacgcggagataagcctcgactaccagctcaatccataagctcgctggcgcccgctatcggcgggcgctcctgccctaaaagccatcgttggcaaatgcccccggcgttaataaatgctatctttctcgctcacggatcagagcaggtgggtaatgaccagcatacgcggaatgattgaagctcaggttctgggcttaaccggcatggcgctaaaagagatcgattttgaacaccccaaaggcgaaccggggctatttggtccgcagtcggccatctggcaggttcatggcgattttacctccatgctctgcggcggcgtcagcgcgctgctgttacagatgctgcatcctctggcgctggcgggcgtctgggatcactcaaacttccgcgaagatatctttggccgcctgcgccgtaccagccagtttatttccgccaccacctttggtaccaccgccgacgccgaacggctgatcgcaaaagtgcaggggatccacctgcgggtgagcggcaaggataaagatggcacgccctatcaggccagcgacccggcgctgctcacctgggttcatgtcgccgaatgcagcagctttatggcctcgcacctgcgctacaagcggaccgtggtcagcgccgctcgccaggagcagtattatcaggaggccgccgaaattgcccgccaccttggcgctcgggatatcccggtaacgccgcggcaggttgccgactacctgcaggatatgcgcccaacgctgcgctgcgatgagcgaacgcaggaggttgccgacgtcctgctatcgacccgtctgccggggcgcctgagtcagcccgtcgggcgaatgatgatgcgcgccgggattgacctgctgccgccgtgggcgcaggcgatgctcaatttgccgatgagcgcgctgcagcggcacagcgcacgaattgcggtacacggcgtcgcccgcgtactgcgcgcgtcggtgcgtaacggcgcgtatcattgcgcaatgcgccggatgaatcagttttaattattccggctgcgtttttacgccaaaaatatagccacggctattattgtcatggctatattttttaaaaacaaactattctcatttatatatttgacagcaataaaaataagtaaacattctcttaacggcggcggattattcaggaaaaattaagctaaatcgcgtacgttatttctttttttacggggacgtcatcatggcgaaaatgactgacgatggtcagcgcgcccagattgcgcgtaaaacgacgctggtcagcgtggtggtcaatctttttttatccagcgcccaggttctggcgggcgttttttccggttcgcagggattaattgccgatggtattcattctctttccgatttagtcgctgatttcgtcgtgctgttggccaataaaaaaagcggcaaaccctcggatagcgatcatcactacggacaccggcgctatgaaaacggcgcttcactggtgattggcgcgctgctgttactggttggcgcgggtatgctgtggtccgcctgcggcaaactgctgcatccggcgtctatcccgagcgtgcatattaccgctctgtgggtggcgctcgccgcgctgaccgccaaagagatgttattccgctatatgctcagggcggctaaacaaattcagtcgtccatgctgattgccaatgcctggcacgcccgctcggatgccgcgtcgtcggtggtggtcgcggtcggcatcatcggtaacctggccggcttcgcctggttcgatccggtggccgcgctggccgtcggcgcgctggtcacccgcatgggctataccttttcgtatgacgccctccatgacttgatggatcggtcagtggatagcgacagcgagcagcagataatcaccactattctggcaacgcccggcgtcgtggcgctgcatgacctgaaaacccgacgcgccggcgatgggatcctggtcgatgtacatatcgaggtgccgggagatttatcggtggcggaagggcacgatattgcgctgttggcccgcgcgcgggtgctaaacagccaaaacgtgctgcatatgatgattcatattgacccttgccgcgcggatagcgacgcgattatcgcttaggttattcccctgaacgcttgagggctttgtcagcctgcggataatattgcctgtgaaataaaaaaggaccataatccagcggctattctttcatcgctgataaatagccggctgacgccgtgtcgtgtttttaaacaatataaaaaggcaatcgcataatagaaagtatctattattcgttcgaaacttcaggaagtaaaacaatgattatccggccagaacaacactggttccttcgcttgtttgactggcacggctccgtgctgtcaaaaatcgtctttcgcctgctgcttaacctgatgatgtcgattatcgcgatcatcagctatcaatggtacgaacagctgggtatccatcttaccgtcgcgccgtttagcctgctggggatcgccattgccatttttcttggctttcgcaatagcgccggatacaaccgctttgttgaagcgcgcaatttgtggggaacggtgctgattgcccagagaacgctggtgcgccagctgaagaatatcctgccggccgaaagcgcagcccatcaacgcctggtgagctacctggtggcgtttagctggagcctgaagcatcagctgcgcaagacggatccgagcgccgatttagcgcgtctgctgccggcgcaaagcgtggcggaaattctcgccagttcgatgccaaccaaccgcattctgctgctggcaggcgatgagcttgggcgcctgcgcgcagaagggaagatcggcgatgtcaccttcagcctgatggacaataagcttgatgagctggggcacgcgctgggcggctgtgagcgcctcgccagcaccccggtgccctttgcctacacgctcattttgcagcgcaccgtgtatctgttctgtacgctgctgccgtttgcgctggtcggcgatcttcactatatgacgccgttcgtgtcggtgtttatctcctacaccttcttgtcgtgggattcgctggcggaagagctggaggacccgttcggtaccgcagccaacgatttgccgctgaacgcgatgtgtaacaccattgagcgcaacctgctggatatgaccggccagcatcccttaccggagaaactggcgccggaccgccactacaatctgacctgatttttgtatgtttattattcgttaaataagttaaatctaacgcgtgatagataacattgattatacagtcaccgctctgattgttatgctttcgttaacaaaaaacacccgttaccctggctggtaacgggtgataagagatcgtgcggcgtttcacctgccatacgccgccgaaagcgcatcaggagtgaacatgagtaacagaagacgcgtcgttcccggcgtccatccctatgatggtccggcgggcggctggggtgccttaaaagccaccgctatcgccgttcgtacgcaaatggatgcgctcgatgcccccgccacgctgctgcggaccaatcagccggatggctttgattgtcccggctgcgcctggcccgacaaagagcataaatcgacgtttcagttctgcgaaaacggcgccaaagcggtgacctgggaagccaccagtaaacgggtcacggctgagtttctcgcggctaacaccgtgacgtcgctgctggcgcgcagcgattttgagctcgaaggctacgggcgcttaacccagcccctggcctacgataaggccagcgataccctgcgtccggtctcatgggacgcggcgtttacccgcatcggcgccattcttcgtacgctgcagcccaatgaagtcgagttttatacctccgggcgcgcctctaacgaagtggccttcctgttccagctgtttgcccgcgaatatggcaccaacaactttccggactgctccaatatgtgccacgagtcgaccagcgtcggcctgccgcagtccatcggcatcggtaaagggacggtctccctcgatgactttgataagaccgagctggttatctctatcggccacaatcccggaaccaaccatccgcgcatgatgggcacgctgcacgaactggcgcgccggggggtgccgattatcgtcttcaacccgctaaaagagcgggcgctggagcgtttcgccgatccgcagaacgtcattgagatggcgacctacggctcaaccaacatcgcgtcgacctatttccaggtcaaagcgggcggcgacgcggcggcgcttaagggtatcgcgaaggcgctgctccggctggaagcagagaagggcgatgtgctggatcgggcgtttatcgatgagcatacgctgggctttaccgagtttgcgcaggatgtggacgcgacgccgtggccggatattgaacgggagtccggcctgacgcgcggcgatcttgaacgggtggcggcggcttacgctaaatctaacgccacgattatcacctacggcatgggcatcacccagcacaataagggcacctctaatgtacgcctgatagccgacctgctgctgatgcgcgggaatatcggcaagccgggggccgggatctgcccgctgcgcgggcactccaacgtacagggcaaccgtaccgtcggcatcacggaaaagccgagcccccagtttctcgccaacttgcagcgggtgtttggttttacgccgccgcaggagcatggtcacgatgcggtaaaagcgctacaggcgatgatcgacggcgaatcgaaagcgctgctctgccttggcgggaacttcgcggtggctatgccggatagcgaacgggcttttccggcgatgcgggggctggatctgagcgtgcatattggcaccaagctgaatcgctcgcatcttctggtggccaatgagacctttatcctgccgtgccttggtcgaaccgaactcgatattcaggagacgggacgccagtcgatcaccgtggaagattcgatgtcgatggtgcacgcgtcgtctggcaagctgaaacccggttcgccagagctgcgatcggagccggcgattgtcgcggcgatggccatggcgacgctgccggaaagcaatgttgactggctgtcgctggtcgccgactacgatcgcattcgcgatctgatcgagcagaccattcccggctttgaccagtacaaccagcgtattcgccatcccggcggttttcgcatgccgctgccgccgacggagcgtatctggccgacgccgaccggcaaagcgatgttttccgtttttcacggggtgcacgaaaaccagcaggtagcagggcatgacgtgatgcgcctggtgacgctgcgcagccacgatcagtacaacaccaccatttacgccatggacgaccgctaccgcggcgtgtttggccgtcgcgacgtgttgtttatgaacgagcaggatatggctgagcagggattcgaacacggcgatcgggtggatatcagctccgcgctgccgggccaccatcagcggctggaagatatcacgctggtcgcctacagcatcgcgccgggcaccgttgccgcctattaccccgaagccaacgtgctggtccctctggattatctcgataaagagagcggcacgccgtcgtataaatcggcgcccgtccgtttaacgctgcgctcgaaagagatccgcgcgctggcggggcttcgctaaagcgccgtttgcccgcggcgatcgtcgcgtcgtgggcaaaatcgctacctctgcgccagaatcagcttaatccccagcccgacaaaaccggcggcaaagcaggctctcagcccctgtaacacccgcggacgcgacagcacgtatccgcgcatcgccgccgaaaaggcgccatagagcataaaaaccagcagcgtcatcagcataaaaacggcgctcaggatcagcatttccccgatcggcgaagccgagccgcgctggataaactgcggcagaaaggcgagaaagaagagcggcagcttggggttaagcaaattaatcagaatcgcgtggctgatgacctggcgcgggttgcgttgttcgacgccctccacgttcaggctgccgcgctgggtcagggtggcccatgcgaggtacagcagccaggcgacgccggcgtacttcaccagctcgaaggcgccgggggtgctgtggaggatggccgccagcccggttatcgccgccagcatatgcggaataatgcccagcgtgcagccgaaggccgcggcaaaactcatgcctctgcccgccgccaggccggtggcaatggtgtaaagcgtcccggtgccgggggcgatgaccacaatcagcgaagtcaaaagaaactcaggggtgatgaacgccatgatgtcattcctgttgcagagaatcgaggccctgagtatttcgcaaagccgcgcgccggtattgaacaaaattgcacaacgtcggctagcggctcgcctgatagctgcctggggtcatggcgaactgcctttgaaacgcgcgggtcagatggctttgatcggcaaagccggccatgaaggcggtatcggcgggggagtgaccttcggcgagcaggcggcgcgccagacgcaggcgggcctgtaccagataagcgtgcggcgtgatgccggtttcgcgagcgaagccgcggatcagctgaaagcggctgaggccgcagagggtagcaagcacctcgagagagattttctcttcgggggcatcatcgagatattgcctggccagcgcgatggagggggtaccgtgtttatcaggccgccgtgcgcagagatggtatcggcttacccgcatcaggcagagcagtagcgcctcttctacggcggtatcttcgggggcgctggtgacaatctcgctaaacagccgctgcatcagtccgcgcagctgcgggtcctcgaccaccgggcgcaggagaatatcttcggcctttatcgccccctgaaattcagcggcaacccgctcgggatcgagatagatcatctgccagctgcgcgggccattcagcgggataccgtcgtgcatctcccccggattaaccataatgatatttccggcggcggcctcaattttgcccagatggctccacgaacgctgcgcgccctgagtgaaaatcccgatgccgaactggtcgtgggcatggcgcggaaaactctgttccgtgactaacgacatggcttccagtcccggcatggcgagccggtgctgctgaacgtgatgaaggcgagttttcaacggtttctcctgccggggcatagcatgagtgtagcctcaggcacgcgggacgagcaacggtccaccggcgcttgaatttcatcaacgcagaacataacatttagctaacattttgcctgctgcgctgccagcagattgcgcaaacagtggatgataatggatattaaacagcttaagtacctgattgcgctcgacagaacacgacatttcggccaggccgcggcggcctgccatatcacccagcccacgctatcgatgcgtatccgcaatcttgaagaagaacttaatctgacgctgattcagcgcgggcagcggtttgaagggtttaccccagagggtgagcgtattctggcctgggcgcgagcgctgctggcggcgcacgacgggctggaggcggaggcggctatctgtcgcgggcagatggtcggccagctaagagtcgggatggtgcctttagccagtctgaatccgatgcagctgattaagccgctggcggataaatacccggagctgcagttcagtctgctgtccatgacctcggaacagattatcgacggcgttagccgcaaccagctggatctggggatctgctatctgcaccacgtcgatagccaactgttcaacgtggtctggctgccgaatacccgcatggggctgctgcacgataggcgtcattatcagtttgccgacgcgacgcctgagtgggataccctggccgcgctgccgctgggctttctgaccaagggcatgtactaccgtgaatcgattgagatgagctttaaggccaaggggctggcgccaaaatacgtttttgaaagcgactccacgtttcagatcatccaggcggtgcaggccgggatctgctgtgcgattatgccgctgaacaacggcctcgaagcgctaagcgataatctggaaatcaggccgatccccgagacggaggtcgactcgatgctggcgctgatcatgcgcaacaaagagccagtgtcgtcgctggcggaaaaatgcttcgccgatgcgcaggtgatttttagcgaacgccagtcggctgacggcgcttagctggccatctgcgactggataaattcaagccagacgcgcgttctggcgggcataaagtggcgctcccgatagagggcggagagctgtaacggcgccggcggcagctccagcgtgacttcctggagttcaccgcgatcgataaacgggcggcagggtttctcccccagaatagcgaagccaacgccggcaagcgcggcatgcagcgccatttcgccgctgttgacgcgatagtgcccgttgacgttaacctttttaaagctaccgtccgccgcggcaaattgccaggcttgccccgcgagggcgctgacggtggtaatgcagggctgcgcggttaattgctcgctgtgtgtcggcatacccgttctggcaatcagctgcggagaagcgaccacgcagcagggaaacgaaaagagcgggcgcgcaatgacgctggcgtcttccattttgccgcgggtgataatcaccgcaatatccacatcctcttttaacacctccgttcccgccagattcgtggtacagctgacgattatttttggatagcgcatggcaaattgcgccatcagcggcgcaaacagcgaggggccaatttcgttcggaagacacaagcgtagcggcccttcgggttcggcctgctgctgcgtcagttcagcttccgtagcggcaagttgctccagcaccggtcgcatactggcgagcagcgtctgaccggcaggggtcagcttcatgtgccgggtactgcgctgtatcaggcgcagctgaaggctctcctcaagctgcgaaatctgtcggctcacgttcgatgagggcatctgcagcgcttttgctccggcgcgaaaggagccattttccgccacggtgacgaacacccgcagggcgttgagatccaattttttcactctcgattatcccgattttgataattaacaacgtcatttttaccgtcttatgcccggttttgccagacgctagactctccgcattacatagtcaggagtcttacatgcccggatatctggtacgaataacgttgatcatggcctttgttcaattcatcaacgccctcgaatatatgatttttaatcccttatttacctggatggcgccgacgtttcaggtgccggtaagccaggcgggttacgtcaccggcgtttatacgctggcttccgtcattgctggggtaagcgtctggcgatgggtcggtaacgttaaaccgcggcgctttttgctctgcaatatggccctgttggggggattaacgatgatgacgctgaccaccacccggtttgacggattgttgttctggcgttttcttgccggtctggttggcgggaccacaatgggcgtgggcagcagtctgttaatcaacattatgccgccgcacctgcgcccgcgggcattggcctccacgattgccgcattctcgctggtcagtattgtcggtatgccgacgatgctatttctcagtgcaaaaatcggctggcagatagcccccgcgacgatcggcggactctgcttaatcgcgttaccgctgataaaactggcgctgccggagcaacccatcgaggcgagccgtcaggcgggtttgcgctggtcgtcatcggtgctgttttacgcctccggcaacgcgctcgcgcagttcagtccgatgttaatcattccgctgctggtaccgttactgacggtgaaaatgggggccagcggcgatgaattgccgtggctctttttcggcggaggcgtggccggactatgcgcaactaaactcaccggcaagctatgccagcattacagcggctaccgcatcagcctgctggccagtctgctgtttatactgagcctgagcatcgcttttacctgcaaccgcggcggcgcactgtttatggtgctgtttctggccgccgcctactgtcgtctggtggcctcatcggctgtggcaatgcgttttccagcggatagcgccaggtccgggtttacgcttttacagaataccctgatgtcattaagtacggcggcggcctttctgctttcgtcgtgggtgctctcggttgacggcaacggcgagcgggcgacgcaggggatattgctgctctgcgccctgagcgcattgccgctgccgtggctgctgcgggttcaggagaaaagattagccacgcgcgccgccggctaacccggcggcggctaccgtcaaatattctccaggctgatcccgcgggttttcggaccaaagatgcccaccgacagcatcaccatcagcatactggcgacgataaagctaatcacgcctggggtaccggcgtattgcaaaataatgccgatcaaaatgctggtgatcgccgtcgacagccggctgaaggagtagcagaagccgaccgcccgcgcgcgaatgtgggtcgggaaaacttcggcctggtaggcgtgatagctaatggtcagccaggcgtttgaccaggtgatcataaacccgcaaatcaccagcagcaccgggctgttctgcagggcaaacagggtaccaaacaccaccgtcatcagcgcggaaagcacaatttgccatttgttttcaaaacgatgaacgaagcgggtgcagaacagacagccaatcggataggcgagggtaataaagaacgcgtacagcaggctgtgggtgatgctcgccccctgaccggaaagcagggccggtagccagttgccgaagccaaagaagccgatggcctggaagaagttcattaccatcagcatgatcgtacgtttgcggtactgcggcgcccagatcgctttaaagcttcccagcctgcgcgggttatcctgcgtctcaacctggtggcgcggcgagggagaaacgccgcagcgctgttccatttcgcacatcaccttatgggcttcctcgtggcggcctttttcatccagccagcgcgccgactccggcagcttcttgcggataacccagataatcagcgaacagagcgcgccgaagataatcacccagcgccagccggtcaggccgaaaagggtaatcggcaccagcagccacgacatcagcgccacggcggggaccgataaaaactgaataaagaaggcgaaagcgaaggctttattgcgcagatgcgtcggcacccattcgcttaaataggtgtcgatggtcaccagctcaatgccgagaccgacgccgaccagaaagcggcagaagataaccccttcggcgctgctttgcagggccatcatcatcgaaaatacgccgtaccaggcgagggcaaacataaacgtcaggcggcggcccagtttatccgccagcggcgcaagcaggctggcgccaataaacagccccataaaggtggacgacgcgaaggcggcctggtcggagataccgaagataccctgctcgccggtatggaaaatatcctctgccagcagcccggtactgatataaccggtctgaaaaagatcgtacagctcgaagaagccgcccagcgccaggagggtgataaaagaccacaggccaacggaggcgggcagcgcatcgatgcgagcggtcaggctggagtggggatgtcctggggaggcgaacgcggcgtcgcccagaacctgggtggtagacatattattattttcctcagataaaatgtttgcctgctaatgttatttgattgttaatggttttaaatttttaatcgcatcgggggagagagatttgcagaataaaataatgccaatgtggtttggctggcgttgtatgctggttttcgcctgtggcccggccgcggagtgaaggaattcaccatcgggccgcaaagtttgacctgaaataaatttaagataacgagagattgttgcgctcaggttattcacctacattcaaagcgagtactcccactcaggaaaataatcatgtctagcaagaaaattttacaagcagcgctggcggcggcgctttcgctgtcaatgatggccacgccggttttcgccaacccgggtaatggcaacggcggcggtaatcatgggaatagcggtaaccatggcaataacggtaacaacggcaatagcggtaaaaacaacgttgataagggcaaccagggtcataaagaaggaaatccggggcagagaaaaaactacggcaaacccgatcatgtctccgctgatatcagcttctccagagcgcgttcgctggcggtaaactacggtttaaccggctatcagtcgctgccgccgggaatcgccaaaaatctggctcgcggtaaacccttacctccggggattgcaaaaaaagcggttccggcatcgatgctcaacgaactgccttactatcctggctatgaatggcgcgtggtgggccaggatttggtgctgatcgcgctgagtacggcgatcgtgacgtcgataattaatggcgtctttgactagtgaattaaccccggttcgcgccggggtgaatcctggcgggcaggcttagcgcattaaggtcattctaaacaaatcgtcactaaagcgagattttaactttactcaaataattgaatgactataatgagcacaaattcacacaggagaaatatgttggacagtcacccttacttaaacatcaaggcaagctgacgctatttttcctgcgctgcttgccaaccggcgggcagcaatctcctcatccagacgattgcatcccataaaacataacgcagcatggctgcgaggataatcgtcatgttcatgtttaaaaatacattattccctccaccgtcaacgcgacgttaatcgcctctctggcgacaatttgtcgtgtgcttaataaagcacgtagttaattcttccagcaaaaatggaggaagctatgttgatgtttccttatatcgcaaatttactcgccgcgatgctgttgggcgcgctgattggcgccgaaagacagtggcgtcagcagatggctggcctgcgcaccaatgcgctggtcgccaccggcgcggcggtttttattctgagctctatctccacatcgccggatagtccgggacgtattgccgcgcaggtggtttccggaattggttttctcggcgccggggtcatcatgcgggaaggcatgaacgtgcgcggcctgaataccgcggcaaccctgtggtgctctgcggcgattggcgtactgtgtggcttaggccagttctggcaagcggcggcggcaacgctgatcatcctgtgcgccaatattctactgcgcgaagcggcgcagagaattaatcagatccccggcgcgacagaagaagaaaaatgctacgtcctgaatattatctgtcatagcgaacatgaaaacgcgattcgtcagctattgcttaatatcagtaaagagatgacgctcagcttgcaggggctggtgtcgatagcagcaaaagaacaaggacataaagaaatccgcatcgaactggttggtaataccgactcccgcaaagcgcgagatcttattatgtcaagaattggcggtgacgaaaacattacgtcagtgcgctggtgcgtcgaggggagttagcctccctgatattctactctggcaatgatttgtctaaggagggaatgatggatattcccaggcaattaaagtaataagcgtttaataacgtaaaaatgaattatgcataagtcaattatgcagggataacgacgtcttaaatttgaggaataatcatgactgacatgaaaatagaaaaccggaaaataaaccggtctgcgtcagaaaatgataagcagcataaaaaaagcttcgccattgaaaccgaggcatttaacagcccggatcatacgctggcgcggctcaacagcagccgtcaggggctcaccaccgaagatgtccttgaacggctgaatgaatatggccgcaatgaagtcgcgcacgagcaggcgccgccggcgctaatccagcttttgcaggcattcaataacccgtttatctatgtcctgatggcgctggccgccgtcagcttcgtgaccgattactggctaccgctgcgtaacggcgaagagaccgatctgaccgggattatcattatcgtcacgatggtcagcctgagcgggttattgcgtttctggcaggagtttcgcaccaacaaagcggcgcaggcgctgaaatccatggttcgcaccacggcgacggtgctgcgtcgcggtcctggtaacatggggccggcgcaggaggagattgccattgaggaactggtgcccggtgacatcatcttcctggctgcgggggatctggttccggcggatgtccgcctgctggagtcccgggacctgttcgtcagccagtcgatacttagcggcgaatcgctgccggtggaaaagtatgacgttctggccagcgtgtccggcaaagggtgcgacaggcttcccgaaccgaacaaagataaaagcctgctggagatgggcaatatctgtctgatgggcaccaacgtgaccagcggcagggcgcaggcggtggtggtggccaccggaaaccgcacctggtttggttcgctggcgaagtccattgtcggtacgcgcacccagacggcgttcgaccgtggggtaaacagcgtcagctggctgctgatccgttttatgctggtgatggtgccgattgtgctgctgattaacggcttcagcaaaggagactgggttgaggcatcgctgtttgccctggcggtcgcggtgggcctgacgccggaaatgctgccgatgatcgtcagctcaaacctggcgaaaggcgctatcgccatgtcgcggcgcaaagtgatcgtcaagcggctgaacgccattcagaactttggcgccatggacgtgctgtgcaccgataaaaccggcacgctgacgcaggacaatatcattcttgagcatcatcttgacgtcagcggcagcgagagcgaccgggtgctgacgctggcgtggctcaacagcagcagccagagcggggcgcgcaacctgatggaccgggcggtgctgcgctttggcgaggggcggattgcgccagcgaccaaagagcgcttcgtaaagcttgatgaactgccgtttgattttgtccgccgtcgggtctcggtgtcggtggaagatgtccgccacggcgataaaagcctgatctgcaaaggcgcggtcgaagagatgctgatggtggccacgcatctgcgcgaaggcgaccgcgtggttgcgctggatgaaacccgccgcgatctgctgttagccaaaacgcaggattacaacgcccagggtttccgcgtgctgctggtcgcgacctgcaagctggatgactccgccctgacaaccccgctgtgcgccgcggatgagcaggggctgacggtcgaagggatgctgaccttcctcgatccgccgaaggagagcgcgggaaaagcgattaccgcgctgcgcgataacggcgtggcggtcaaagtgttgaccggcgataacccggtggtcacggcgcgtatttgcctggaagtggggattgatgcccacggtatcctgaccggcgcacagattgaagcgatgacggataacgaactgcagcgcgaagtggaaacgcgttcggtattcgctaaactgacgccgctgcagaagtcgcgcatcctgaaaacgctgcagaaaaacggccacaccgtcggcttcctcggcgatggcatcaacgatgcgccggcgctgcgcgatgcggacgtcggaatttcggtcgacagcgcggcggatatcgccaaagaggcatccgatatcatcctgctggaaaaggatttgatggtgctggaagaaggggtgatcaaagggcgtgagacctttggcaatatcattaagtacctgaatatgaccgccagctctaacttcggcaacgtcttctcggtactggtggccagcgcgtttattccgtttctgccgatgctggcgattcatctgctgatccagaacctgatgtacgatctctctcagctctcgctgccgtgggacaagatggataaggaattcctgcgtaagccgcgcaagtgggatgcgaaaaatatcggccgctttatgctgtggattggcccgacgtcgtccatttttgatatcaccaccttcgcgctgatgtggtacgtgtttgcggcgaatcacgtcgaagcccaggcgctgttccagtccgggtggtttattgaagggctgctgtcgcaaacgctggtggtgcatatgctgagaacgcagaaaattccgtttatccagagtcgagcgacgttgccggtgctgctcaccaccgcggtcattatggcgatgggcatctacattccattctcgccgctgggggcgatggtcgggctggagccgctgccgctgagctacttcccgtggctgatcgcgacgctgctcagctactgcctggtcgcgcagggcatgaagcgtttctatatcaaacgctttggtcagtggttctgatgataaggaggcgcagagatgaatcgttctccggacaccctcatcgcgctgatatttttcctggtgggtctgctggtgctgttgctggctatctggcaaatcctgttctgaaaaagggggcgcgatgcgcagaggatcgctggataaagtctttattcaggtggcgattattgcggccatcattattctgctgacaatctggattagataagaggagcccgggccattggcccgggtttagcatttctgccggggaaaggattacagatcgaagcggtcgaggttcatcaccttggtccatgcggcaacgaagtcattcacgaacttctgccgcgcatcgctgcaggcatacacttcagccagggcgcgcaggacggagttggagccaaacaccaggtcaacgcgggtcgcggtatatttctcttcgccgctcttacggtcgcggccgataaacagctcagcgtgctcgtcagcggctttccagacggtacccatatcgagcaggttagcgaagaaatcattgctcaacacgcccacgcggtcggtaaacacgccttgtcggctgccgtcgaagttcgcgcccagcacgcgcagaccgcccaccagtaccgtcatttccggcgccgtcagcgttaactgctgcgctttatcaatcagcagcgtttcggtggagatgccgccgccaacgcgacgatagttgcggaaaccatcggccagcggctgcagcagatccatcgcttccacatcggtctgatcctgacgcgcatcgacgcggccaggggcgaagggaacgctaacctgaacgcccgccgccgcggcagcctgctcaatgcccaccacgccggccagaacgataatatcggccagcgacgctttaccggatgcctgctgaatcccctgcagggtcggcagcacgcgggacgcgatggcgtttaccggccaggatttctgcggttccagcgccagacgcgcgccgttggcgccgccgcgtttatcgccgccgcggaaggtggaggccgatgcccaggccacggaaaccagctcgctgaccgaaaggccggcgtcggcaatggcggttttcagcgtcgcgatatcctctgcggttggggtgtggaccgccgccggtagcggatcttgccagatcagatcttctttcggcacttccgggcccatgtagcgggacttcggccccatatcgcggtggataagtttaaaccatgcgcgggcaaaggcttcgttaaaggcctgcgggtcgttaaggaagcggcgggaaatcttgtcgaactccgggtcgaagcgcagcgtcaggtcggtgaccagcatggtcggcttgcgttttttgtccggattaaacgggtctggaataatttccgggccgtctttcgcttcgaactgaatcgcgcctgccgggctgcgggtttgcacccactcatatttgtacaggttttcgaagaagtagttgctccactgggtcggcgtttgcgtccagaccacttccagaccggaggtgatcgcgtcggcgcccgcgccgctgccgtagctgttcgcccagccgagtccctgcgcttcaatcggcgccgcttccggctctgcgccaacgtggctggtcaccgcggaaccgtgggttttgcccagcgtatgaccgccggcgatcagcgcgacgatctcttcatcattcattgccatattgccgaaggtcgcgcgaatcgcggaggcggcggagagcgggtcgccgctggcgttggggccttcagggttgacgtaaatcagccccatttcggtcgcgccaatggcctgctgattcaggctttccggatgacgatgggccagccattcggtttcgttaccccagtcgacgtccagatccggttcccaaacgtcttcacgaccggcaccgaagccaaacgtacggaaaccggcattttccagcgccacgttgcctgccagcatatagaggtcggcccaggagattttttgcccgtatttttgttttaccggccacagcaggcgacgggctttgtcgaggctgacgttatccggccaggagttgagcggtgcgaaacgctgctgaccgcggcccgcgccgccgcgcccgtcaacggtacgataggtaccggcgccgtgccacgccatacgaataaacagcccgatatagctaccccagtccgctggccaccactcctgagaatcggtgagcagggcgcgcagatcggccttcagggccgagtagtcgagcttcttaaactcttcgcggtagttaaagtgttcgcccagcgggtttgaacgattggagtgctgattcagcagatccacccgtagttgatttggccaccagtcgcggttgccggtgccaccgcccgcgctctgggtgggcgtcgccgtctcggcgtggaaagggcatttccctgccgacggggtattcgaaggatcgtttgacgtgctcatatcaggctccgtttgcttttgtgaatgccattacgatatacactgctaccaataagcgatatttgaatgagtctacggatttaatagttatttccgttcaatgcctttgtaaaaaccgaacatatatcattgctcaatgattgattgttcagtattgactcaaccacaatagtcgtaacatacgcgtaaaggaatcgttaagacatcatccccgccagcgaagagcgattgtttgagttacgacaattttagtgcgtaaaacggcttagcgctgccagtataaaggcgtaccaaaaacgtcgataaaatagtcaattaccgcacgtacgtttaacgaaggatggcgggcatgagggtagatcgccgacaccggcgaggagctggtgccgatcgccgcgctgtagtgaggcatcagctgaaccagccttccagcccccatggcttcattgaccatccaatcgggaaagagcaccacccccatgcctcccagcgcagcggtcagcagcgcatcggcgttatttgatgccagccgcggcgtttgcggatagtgaacccattctccctccgcgaggcggaacagccagcggttaggtccatttgaaccgctgtagaccagcgtgctgtgatggcgaagatcttccggtttctccggcgtgccgcagcgctgcagatagtccggagccgcaaccagatagtgatgctgcatacccagtactctggcatgaacgctggagtccggcaggctgccgatgcggaaaatcaggtcggtcgcttcgcggtgcggatcgataaaatcatcggtcagcgccagcgcaatttgcatctgtggatagcgctgcgttagccccggcagccacggcgcgatatggcgctggccaaaatagaccggggcgttgatccgcaccagtccacccggctcaagacgacggtcctgcaggtcgcgcctggcaacgctgaaccgttcgccgagccctctggcatgttcggcaaacaggcgtcccgcttcggtgggaaccaccgcccgggtattacgataaaagagctgctggccgagcgcatcctcaagctggtgaatgacgcgcgacaccatcgagggcgaaacgccttcccgcctcgccactacggagaaactctggctgtcatagacggcgataaacagctgtagcgcccgaaaattcacattacccgcatcgctcattaatgcaatatccgcaaaagtgtttccctgattgtatcgtttttcacattacttcgctgctttatgctctgccacccaatcaataatcggatatcaacgatgcagttattacttatttttcttgtgattgccggcggcatggggttatccgtggaagccggactactcgggccgcttgccggtcaggtaggggacctgtgggccaccttcagcatttttagcgtcgggagcgcgctaacctttctgctgatgctgctgtttggccccaggcagggcccctcgttcttctccttaccgggctggcagcttaccgggggcgtactggggcccatttacgtcgtcatcttaaccatcgccgtaccggttatcggtatcgccatgacgatgatcggcattctggccggtcaggtatgcaaaagcctgctgattgaccactacggtctgtttggttcggcaaaacgtaaaatcgatggacggcgggttatcgcgctgctgtttatcatcgtcgccctgattctgatcgctacaagctgaggagttaacatgagtagcataatgattttgctggcgctggtcggcggcgcgatgttgagtatgcaggcggcgattaacggccgtttgggcagccaggtgggcgtatttcgcagcgcgtttctcacgtttgcggtgggcgccttgatcacggcgctgctgattttttattttgccccccatcagtcgacaacgctgctggatgtgccgaaatggcagctgctgggcgcattttgcggggttccctatatcgtgattatggtggtggcggtgcagcgtatcggtaccgcgacggccacggtggcggtgatttttggccaactggccatgagtctgctgatcgataattttggctggctgggtaacgacgccattgccttttcagcggggcggctgggggccatcgtctgtctggggctggcgctgttctttatttaccgctccagcgcggcggcaaaagctgaagataaggagagttagcccacctgttcaggtgagttgtcgcgcatcgccaaccgcggtcatactgttcgtcaccctgtgactggcgctttagactggttactgtcggggagcatgggtatcgccgccgcgcgcctgggcatcacatcactttaccggagatacgctatgcctgagataccgtcgctgctgaccttcgcgcttgttgcccttggcctggtattgactccggggccgaatatgatctatctgatttcgcgctcgatttgccagggaagaagggccggactggtctccctcggcggggtggcgctggggtttgtgttttatatgctgtgcgccgcgttcggtattaccgcactgatcttcgccgttccctacgcttacgacgcgttgcgcatcagcggcgtggtctatctgctttatctggcctggcaggcggtgaagcccggcgggcgctcggtctttgcggtgcgcgacctgcctgccgatagcggccgtaagctgtttatgatgggctttattactaacctggcgaaccctaaaatcgccatcatgtatctctcactgctgccgcagtttatctcgcccggacacggcagtatccttgcgcagtcgctggtgctgggagggacgcaggcgctcattagcgtagcggttaatgcgctgattgtggtgatggccgggcaggtgtcgctgtttctcgcggggcgcccgttatggcagcagtttcagcgctggctgatggcgacggtgctggcggggatggcggtgaaaattgccttcgaggcgcggaagtaatcgctgcgcccggcggcgctacgctgccgggcgcaggggaatggctttaggcccctggccctatcagctgtgagcggatcgtcgcctccggcatcatctccagcaggccgttgctcagcatctctcccgcctcctgcagcgcgctaagcggcatttccggcaggctttcaagaataaaccacatccgcggactctccacgctcagacgagtacgtactccctgtcgccagttccagcgtcggcaggtcacgccgcgatcgtcgccccagaccacttctcccgcgtcgggatattcgtgaacgatctgcccctctttgacggtatcgaacggttcgctgccgtccgcgagcttgaggtgcggggcgccaacgtaagccgccaggttttcgccgccgaccggcacggcgtagcgcaggctcaccgcattatagagatcgacgatgggatcgatcgcagccatctcgccatcgcgcagcacccgcctgcgcaaggcttccgccgagcagggcgtccgcttgggttttgcgccaaaggcgcggaatacctcgttccaggcctgcaggtgcgcctccgcccactgcggctcgccggcgataaccgcctggcaggcggagcggagcgcatcggacccgaccaggggggcgcgtacggcggcggaaacgacatcaatgctcagggcgcgaaagccgggggccagcgcggagacctgcgggctgattgacggtaatacgctattcattggataatcctgtaacgaccattttaaagcataatatcgaccgatgaccaataaagtcaatataacgaccgacgcgggcgccgatgccgccatgattaatgaagccgttgcggcgcgcattaagcgctaccgggcggaaaagaagatctccctggatgagctgtcgcgacgcgcgggcgtcagcaaaggtatgctggtagacattgaagcctgcagggccaatcccagcattgcgctgttgtgccgtctggcctcggcgctgggcgtttccgtggccgattttgtcaatgtcgccacagcgccgccggtaaaggtgattgcagaaggcgagattcccacgctgtggcagggcgagcagggcggcaaggcgcggctccttgccggtaccagcggtccggatatggttgagctctggcagtggagcctcaatccgggagaaatgttcacatcgccggggcacggggaggggacgactgagctgcttttcgtgaccgagggcgccttaaccctgacggttaacgacggggtctatctgattcgagagggggattccgccgtcgcgcgtaccgacgccccgcatagctacgctaacgccggggataagatcgcgcgattcaccatgacggtgagcgaaaaagcgcgctagcaagtgtttcccggcgagcggctatcgtcccgaccgctcgccgccttcacgccatacgcaccaaatccatgcaatgccccatcatcactccccatttttgggagccgcggcggcgcctgccgtcgtagggctgattttacgcgcgctgcgcgcctggcatagaccttgcacactcctgttcagaaggcagcgcaacagacaattgagataacacaatagctggctagggttccggttcactcaggtgaacgtctggtccgagagctggcgacctctgcgaggttacacggcgggacaaaagcccgggagacagcagcaccgttgggtgtcgcgctgcccccgtttctcgtgctaaccagaggtccaccatgaagacaccgccgatcctccgctctcttatcctgtcgctggcgctactggccagcgtcccttcgtttgccgccgtcaaaaaagagttcaacatctgctggactatctatgccggatggatgccctggggcaccatcagcaacgaaaaaatcatcgataaatgggccggtaaatacggcatcaaaatcaatatcgttcagcttaacgactacatcgaatccattaaccagtacaccgcgggccagtttgacggctgcaccatgaccaacatggatgccctgaccattccggcggcggggggcgtagataccacggcgctcattaccggcagctactccgacggcaacgacggcgtggtgctgaagggggcggataaaaagctcagcgatctgaaaggcatggcggtgtatctcccggagctttcggtatcgcactacctgctggttcgcggtctggaaaaagccgggctgcaggaaaaagacgtcaaagtggtcaatacctcggatgcggatatcgtctcggcttttggcaccagcggcgtacgcgcggcggtggcctggaatccacagctttcggttatcaaaaagacaccgcaaaccacggaggtctttagctcttcgcaggtgcccggcgagctgatcgacatgatggtggtgaatactcagaccctgaaagataacccggcgctgggtaaagccctgaccggcgcctggttcgagatgatggccaaaatgcaggccggagatacgcaggcgctaagcgcaatggccgccgattccggcaccgacctcgcgggctaccgggcgcagctaaaaacaacccatctcttctggacgcctgccgataccctgacgtttatctcctcgccggcgctggcaaaaaccatgcagcgggtagcgcagttctcttttgacaaagggctgctgggagagggagcgcagagcgctgactttatcggcatgaccttccccgacggcgtcaccgtcggcgataccgccaacagcaagctgcgctttgatgacagctatctgaagctggccgcggcggggcagctgtaatgattgaccttgggagtccacgccatgcgccacattaaccgctatccccggcagggtatgcgcctgacgctgatgctattgcccttcgtcctgatgatcgccgcctggtttatcggttcggcggtgcggctggaagccaacccgcaggataagctgctgcccggcctgtcgcagatgatcgcggccatcgatcggatggccttcaccccggataaacgcagcggcgagtatctgctgtgggccgacacgctgattagtatgagccgcctgctgattggtctggcgctctcgtcgctgattggcctgggcatcggcatcgccgccggcgtgttcccgatgtaccgcgcggcgctgtcgccgctgatgaccgtggtgtcgatgatcccgccgctggcgatcctgccggtgctgtttatcgtcttcggcctggatgagctatcaaaagtgatgcttatcgttattggcattacgccgatgctggcgcgcgaccttgaacagcgggcgcgggaaatcccggcggagctgtttatcaaagcgcaaaccctaggcgccaatagctggacggtggtgctgcgggtagtgctgccgcagctgctgtcgcggctgataacctccctgcgcctgctgctgggctccgcatggctgtttttgatctccgccgaggccatttccgccaccgccggtctcggctatcgcatattcctcgtccgccgctatatggcgatggatgtgattattccttacgtcatctggataaccctgctggcatggctgatggatctggcgctgcgtcagctgcacaaagcctgtttcccgtgggcgaaaggaggccgggcatgagctttatcgacatcaaaaatatctggcaggagtacggcgaccacgtggtgctggagcgcatcaatttgcaggtgaaagagggcgagttctgttcgatggtcggcgcgtccggctgcgggaagtcgacgtttttacgcctgctgctcggccaggaaaagccgactcgcggggaaatcaccctcgacggccagccgctggcggcggagccggaccgcagccgcggcgtggtgtttcagcgttattcggttttcccgcacctcaacgtgctggataacgtcgccattggcctcgaactcccggcgtcaccgctgtttggccggctgtttgccggcaggaaacgcgacgcgcgcgaacgggcgcagcggatgctggagaaagtcgggctggggcacgcgctgaataaatatccggcgcagctctccggcgggatgcagcagcggctggcgatcgcccaggctttcgtcatgcagccgcgcgtactgctgcttgatgaacccttcggcgcgctggatcccggtattcgcaaggatatgcacgggctgctgctccagctgtggagcgaaacgcggatgacggtttttatggtcacccatgacctcgcggagggcttcaaccttggcacccggctgctggttttcgacaaagtgcgcatcgatccgcaggcgcccaacgcctggggtgcgcgcgttacctacgatattccgctcaatgaagcgcggatgtcgcagataaccaccggcagcgacaataacgtttacgcattaaggagatagtttgatgaccgcactttttcactcatcccccagcctgcgcgaagagcggctacccggcggggcgcacacctcgttgattttgcgcaaagggcagattctgcgcctgaccgatatcgacggcggagccaacgtcagcatgatgatgctgaatccctatgagaagagtgagcgcctgaatctgccggataccctcaaggggcagcacaccgcgcgcctgaccgccgggcactgtttctactccgatatggggcgcgttctggccgggattgttgccgacagctgcggctggcacgacccgttcggcgggatactcaacgccgacgagacgcgtgaaaaatatggcgcaggacgctaccaggagctgcgcaatggcttctaccgcaacggcgtcgataacctgctggttgaaatgggtaaatgggatctgggcctggaggacctgctgatggtggttaacttcttcagcaaagtcacggtcgatgaggatggccgttttcagtttatttccgccaacagccgcgccggagattacgttgagctgtttgcgccgatggatgtcctcatggtgctgaccgcgctgccgcatcctcaggaccctgccgctgagtacgctccgcggccgatccagctgagctggtaccaggctgacgatgcgcaggcggccgcggaagcgctctttacccgcgatgaaaaccagcgcgcgttcctcaacacccaactttttgccctgtaaggaggctgcgatgaccctgatcgccagtaaccgtcgtcccgaagatgccgtctatcgccatgtgatcccggcaggggaaccctggctgtttgaggtacaaaaagggcagaccctgcgcctgcttgacctcgaaggcaaccaggccattgataccctgttttacaacgccgataacccccgagaacgctacgatccgcagcgcacgctgcgccgccagggcaatgcctacctgactaccggcagcgtactctattccaatctgggcaatccgctgctgaccatcgttgccgacacctgcggtcgccacgataccctcggcggcgcctgtgcccaggagagcaacaccgtgcgctacgcccaggataaacgctatatgcacagctgtcgggataatttcctctgcgcctgcctgcacgatggccgcctgcataagcgcgatatcggcgccaacattaacttttttatgaacgtcccggtgacgccggaaggcggtctgacctttgaggacgggatatcggcggcggggaaatacgttgagctgcgcgccgagtgcaacgccgtggtgctgatttccaactgtccgcagttaaataatccctgcaatggctggaaccccacgcccgccgaggtgctggtatggaactgacccgctggcagcgctggcgtctgctggcctttcggctcttcgccgtccgcgccgaccgcctgaacagtacgccgacgcgcaaaccttaagcgccggttcaccccggggacgacctcaggggaacatcgactttttgcgggacgacccgcgaccctgtgagttgcgcttatgtttgataccttactgattgccaaccgcggcgccatcgcctgccgcattctgcgcaccctgcgcgcgatgcaggtgaagggcgtcgccgtctattccgaagccgacctgagtagtctgcatatccgcgacgcggatgaagcgttaagcctcggcgacggcccggcggcgcaaacctatctggtgacggagaagatcattgccgccgcgcagcagagcggcgccaaagcgatccaccccggctacggctttctgtctgaaaacgcggccttcgccgaggcctgcgaggcggcgggggtggcgtttgtcggccccactccgcaacagctgcgcaccttcggcctgaagcataccgctcgggccttagccaaagccgagggcgtgccgctgctggaaggcagcgagctgctggccgacagcggcgaagcctgccgggcggctgaggcggtgggctatccggtcatgctcaaaagcaccgccggcggcggcgggattggcatgcgcgtctgtcgcgacgcccgtgagctgattgaggcgtttgccgcggtgcagcggctgggacaaaacaacttcagcgacggcggggtatttctcgaaaaatatatcgaacgcgcccgccatctggaggtacaaatcttcggcgacgggcggggagaggtcatcgcgctcggcgtgcgcgactgttcagtccagcggcgtaaccagaaagtgattgaagagacgcccgcgccgaatctgcctgacgggatggcgcaggcgctatgcgcggcggctatcgcgttgggtaaagcggtgagctaccgcagcgccgggacggtggagtttgtctacgacagcgcggcgcggcagttttatttcctcgaggtaaatacccggcttcaggtcgaacacggcgtcacggagcaggtgtggggcgttgacctggtgcgctggatgattgagctggcggcgggggaactgcctccgctacctgagctggccgccgggttacggccccagggccacgctatccaggcgcgaatttacgccgaagatccggggcggcaattccagccttctcccggactgttaacggacgtcttctttccgccggcggacggcgctgccctgcgtattgaccgctgggtggaagccgggtgcgaagtcccgccgttcttcgacccgatgctggcgaaagcgatcgcctggcgccccagccgcgatgaggctattgccggcctggcgcaggcgctggcggagacccgcctgtacggcgtagaaactaaccgcgtgtacttgcaacaaattcttggctttgcgccctttaccgaaggcgagccctggacccgctgccttgagcagctgcgctaccgcgcggcgaccgtagaggtgctgagcgccggaacccagaccagcgtgcaggactatccgggacgtttggggtactgggcggtgggcgtaccgccgtcgggaccgatggacgatcgcgccctgcgtctcggcaaccgcctgctgggcaatgccgagggagcggccgcgctggaaatcaccctcaacgggccgaccctgaaatttaataccgacgttcaggcggtggtgtgcggcgcgccattggcggtgacgctcgatggcgtagaccagccgctggactgcgtattgactattccggcgggggcgaccctgaagctgggcgcgataagcggcgcgggggtcagaagctatctctgcctgagcggcggcattcaggtaccggactatctggggagtaaaagcacctttaccctcggccagtttggcggccacggcggacgggcgctgcgcggaggcgacgtgctgcatctggcgccgcacgccgccgccagaagcggggatcaactacccgccgcgctacgcacggcgctggctgaggtgcggacgctgcgggtgatttacggcccccacggcgcgccggaattctttgcgccggaatatattgcgacgtttttcgccacggagtgggaggtccactttaactccagccgcaccggcgtgcgcctgattggccccaagccgctgtgggcccgcgacagcggcggcgaagcggggctgcatccgtcgaatattcacgataacccttacgcggtgggcgcggtcgattttaccggcgatatgccggtgatccttggaccggacgggccgagcctcggcggttttgtctgcccggtaacggtgattgaagccgacctctggcagttaggccagctcaaggccggggataaagtgcgtttcgtggcggtggatttacccaccgcccggcggctggcggaaggacggcgcgccgagctggcgaccctaagtcaccaggcgatagcctggcagcccgcgccgctgacgtcgcctgtcgtgatgacctgcggcgaggcggacaaacgcctggtggcgcgactctccggcgacacgcatctgctgctggaagccggggagccggagctggatctggttctgcgtttccgcattcacgccctgatgcaggctctggaagcgcaatcaagggaaggcgcgatcgatatcaccccggggattcgctcgctgcaaatccattttcagccggaaacgttgccccttgagacgctgctggcgtgggtgcgcggcgagtggtccacggtctgcctgagcgacgatctgcaggtgccgacgcgcgtggtgcatctgccgctctcctgggacgatccggcctgccgcagggcaatcgataaatatatgaccaccgtgcgccaggacgcgccctggtgcccgagtaatctggaatttatccgtcgcatcaacgatctgcccgatgaacaggcggtatggaatacggtatttgacgccagctatctggtgatggggctgggcgatgtttatctcggcgcgccggtggcgacgccgcttgacccgcgccatcgcctggttaccaccaagtacaacccggcgcgcacctggacggcggaaaactcggtcggcatcggcggggcctatctgtgcgtctacggcatggaggggcccggcggctatcagttcgttggccggaccctgcagatgtggaatcgctatcgcgaggtagcggattttgccggcaaaccctggctgctgcgtttcttcgaccaactgcgtttctatccggtttcggccgaagagctgctgcaaattcgccgcgatttcccgctcggacgctacccgctgcgcattgagcacagcacgctgcggctggcggaataccagcagtttctccgccgtgaagcgcacagcatcggcgcgtttcgcgagcatcagcagcaggcgtttaacgccgaacgcgatcgctggatagccagcgggcaggcccattttgacagccaggagagcgccgtggatgagggcggagacgcgccgctgcggcagggtgaacagggggtggaaagcccgatttccggaaacctgtggcaagtacaaacggcggcaggcagccgggtccgcgcgggggatgtgctggtcgtgctggagtcgatgaagatggagatcccgctgctggccccctgcgatggcgttattcaacaggttcacgtgcagccgggcagcgcggtacgcgccgggcagcgggtggcggtgattattgaggagaaggcatgatgcagcagacctttgatttacgcctggcaaccctggcggagcgttaccgcaccggtaaaaccacaccgcgcagcgtgctggcggacatccgccagcgggcgcaggcgcttaaccccgagttccggttgtttatccatattctgagcgaagaggagcaggagccgtttctggcggcgctggatgacctctcgccggccgcgctgccgctgtacggcgtgccgttcgccatcaaagacaatatcgatctggcggagattgtcaccaccgcggcctgtccggcgtttgcgtatcgggcggatcagagtgcgacgattgtcgctcagctgattgcgctgggcgccgtgccggtcggtaaaaccaatctcgatcagttcgctaccggcctgaacggtacccgatcgccctacggtcgctgccgcaatagctatcatgcggagtatccctccggcggttccagcgccggttccgcgctggcggtggcgctgggcgttgccagcttctcgttgggcacggataccgccggtagcggccgcgtcccggcagggctgaataacctggtgggtctgaaggccagtaaagggctgatatccaccgcaggggtggtccccgcctgtcgtacgttagactgcgtgacctttttcagccccaccgccgacgaggccagccagctgctggcgctcgtcgcacagtgcgatccgcaggacgcctggagccgccgtaatcctcagtggaacagccgtcaggcgttcggcaggccgtccgcggggtttcgttttggcgttccgcgcgagctcaatttcctcggctgccgcgcaagcgaacgcctgttttcccaggcccggcaacggctgacggcgctgggcggggtggcagttgagattgatttcacgccgtttctggcggcagcccggctgctgtatgacgggccgtgggtcgccgaacgctacgcggtggtcggcccgctgatggcgcggcagccggaggcggtactgccggttattcgcgacgtgctggcaaaagcgccgggcaccgacgccacggcgacctttacggcgatctatcagctacagcagtacaaagcccggtgcgacgcgatactcgagaccctggactgcgtgctgacgccaacctatccgcgcccggtgacgcttgacgagctggaggcggagccgatcgcgcgcaacgccgatctcgggtactacaccaactttatgaacctgctggactatgccgcggtgagcgtgccatgcggatttatgccggacggattgccttcgggcgtcacgctgtttggccgggcctttaccgaccagtatttactgggcctggccgatgcgtttcagcgcgctgagcggctgccgctggcgggcggagcgcggctggagaccccgccgcctgaacgcgtcgccggccatgaccgaatggcgctggttgtttgcggcgctcatctctctggcctgccgcttaacggccagctgctggcgcggggcggtcggctgctgcaggcgacccgcagcgcgccgcactatcgtttatacgctctcgcggacggcaaacgcccggcgatggttcgcgccgatagcggcggggcgtcgatcgcggttgaagtgtgggagctacccagcgcggaggtcggttcgctgctggcggccatccccgcgccgctgggtctgggaaaagttgagcttgccgacggacgtcggttagcgggctttatctgcgaagccaacggattaggcgaagccacggagattaccgcctacggcggctggcgcgcctggctggcacgttaaactacaacccctccatcgctttttgatggaggggattggtgacactgtcaccttaaatttctaacatgctgaaacatttctgccagatcattagcaacctttcggtagggctcccgctgcgataacgctattcttccccgcttttcccttttcaggcactttgtaacccaggtaaatgaccgctaatgtccctaatgagagatgaaattcgcgaccattcagcggaaaagatgctatttgtccgccgtgccgtcattgcgtttctactggtggtgatttgcttcgccatcctgatccttaatctttaccgcctgcaggtggatcagcacgacttttatcagacgcgttcaaaccagaacgacattaaaatgctgcccatcgcgccgagccgggggctaattttcgaccgcaacggcatcccactggtacaaaatattaccctctaccgtttgcaggtgatcccgagcaaaatcgccgatatgacggcgctgctgcagcagctgacgccgatcgttgatttaaccccgcaggatatcgccgacttccgcgacgatatgcaccacaacagccgctacaaagaggtgacgttaaaatcggacctgagcgatgttgaagtagcgcgttttgcggtcaatgagtttcacttccccggcgtcacggtggaaagctatcagcagcgcgcttacccctacggcgccgaactggcgcacgtggttggctatgtctcgaagatcaacgacagcgatctgcaaaagctggccaaagccggggaagaagagaactacgccgccgaccataatatcggtaagcagggcattgaaggctactacgagaaagcgctgcacggcaccaccggctatcaggaagtggaagtggataaccacgggcgggtcgtgcgtctgctaaaagaggtcccgccggtggccgggaagaacatctacctgacgctggatctgcacctgcagcagtatatcgaatcggtgctgaaggggcagcgcgcggcggtggtggccgtcgatccgcgcgatggcggcgtgctggccatggtgtcgagccccagctacgatcccaatccctttgtcaggggcatcggctatcaggcctaccgttcgctgctcgataacccggaccggccgctgattaaccgggtcacccagggcctctatccacccgcgtcgacggtgaagccctacatggcgctgtcggcgctgtcggcgggcgtaatcacgccaaccacctccttcttcggcgcgccgacctggacgctgccagggacccagcgccgctaccgcgactggctgaagagcggccacggcatgcttaacgtcaccaaagcgatagaagaatcggcggatactttcttctatcaggtggcgtttgagatgggtatcgaccgcattcacgagtggctaagcaagtttggctacggtcagtctaccggcatcgatcttaacgaagagtatgccggggtgctgccgagccgggagtggaaacagcgggtgcataaaaaaccgtggtatcagggggataccatttccgtcggtatcggtcagggctactggattgccacgccgatccagatggtcaaggcgctgacgaccctgattaacaacggcaaagtgcaaaatccgcatctgctttactccatgaagcagggtaataaggtcgagcgctatcagccgccgcaggatctgccgcaggttggcgatccgcattcgccctactggggcgtggtgcgcaacggcatgtacggcatggcgaacctgccaaacggcaccggctataagctgttccataccgcgccgtaccagatcgccgcaaaatccgggacgtcccaggtcttcagcctgaaggagaaccagacctacaacgcgaagatgatcccggtgcgcctgcgcgaccatatcttctataccctgtttgccccctatcagcatccgaaggtggcgatggcgctgattctggagaacggcggcggcgatggcgtggttgcgggaccgacggcgcgcgccatcctcgaccatatcttcgacccggccaatgcgccggcggaacagggcgcgacgtcgacggtgccgcaggtggagagcgccgacgcgcagtaaacgttattcactctgagcataagcgttagcggattggttatttgccgccgccggcgcttttgctcatagtagcgttctgtgttgctgtgaaaaaaggcgctctgatgtcgttaagccgaaatacgcttcttcttgtacaaaccgggactccgccggatgaaatcgtctccgaccacggcgatcttcccctctggtttggcaatttactggcgccgtggcgcaataaaatcagcgtggcgcgcgtctatgccggagagccgcttcccgcgccggataacgcgaccatcgcggtgattaccggctcctgggatatggtgaccgaacgcctgccgtggagtgaaatgaccgcggcctggatccgcgaggcgatggcgatagagatgccgctgtttggcgtctgctacgggcatcagctgatggcgcacgccctggggggtgaggtggactaccatccagccggacgcgaagccgggagtaaaaccatttcgctgtccgcacacggcctggcggatcgtctgctggctgaccacccggcgccgttcagcgcgcacctcacgcatatgcaaacggtcacccgattaccgccaggggcaaaggtgctggcttcgtcgcagcacgaccctcaccagattgtacgctacggcgcgcatgccgtttctacgcagtttcatccggagatcaccccggcgattgcccgctcgctgatcgcgttccgccaggcggcgctgcgcaacgagggggttgacccggacaggctgagtcgtgacgttgtggagagcccggtggcctcggcgattctgacccgctttgtcgcaggctacctgcagccagacctgaacccggcttaacctcagcgctgtttttccgcgagccaggccgccgtttcaccgaggatttcgtcggaaaacgctgcatccgcggtcatccgcgccagaattaacgcgccgaccatggccgaccagctgccaatcgccgcgcggcggctggcttgagcgtcccgatcatccatcgcttcactgagctgcgctatctgctgctgcagccgtgcgctcatttcgtcacgcgcgggttcggactggcggatggtttccgccgccagcgccgccagcgggcagccgctggcaaaattatcccgatgttcgggggaaagataacgctcgatttgcgcgacgacgtcgtttttcgccgcgtcgttctctatcttcagttccgcgagggtttgggcgatcaggtcatccttcgatttgaagtagccgtagaatccgccgtgggtcagaccggctgatttcataatatcggtgaccgtgaccgcgtcaaaaccccgctcgcgaaacaaccgcccggcggcggtcaggattgtctgcttattctcttcaacctgttttctgctcactctcatggcgtcgtcctgctgcgaaattatttatgatgaccatcatataacattatttacagcatacccagcccgtgccattatacatgacgatcatcatgtataaattgaggagtacacctatgagcagtgaatcagcggtgctggtaaccggcgcatcgaccggaatcggcgcagtctatgccgaacgttttgcccgccgcggccacgacctggtgctggtcgcgcgtaatcacgagcggctgacggcgctggccgagcggctgcgcgacgaaaccggcgttcaggtcgacatcctgcaggccgacttaacccaggatagcgacatcgccgccgtggagcagcggctgcgggaagacgcgcgtatcaggattctggtcaacaatgccggcacctcgattcccggtgatttcctccaccagagcagtgacgatatcactcgcctgattaccctcaacgtgacctctgtggctcgcctggcgaacgcgatcgcgccgcgtctggccgaggccggagagggggcgattgtcaacattgcgtcggtcgttgggctgggtccggaaatggggttgaccgtctacggcgccacgaaagcctttgtgctgtttctctcgcaggggctcgacgttgagctgagcgcgaaaggcgtatacgttcaggcggtactgccggcggcaacgcgcaccgagatttggcagcacagcggcaaagacgtggataccattcccggcgtcatggaggtggataaactggtggatgccgccctggtggggttcgaccgcagcgaatcggtgaccataccgccgctgcatgatgaaacgcagtggcaggcgctgaacgcgacgcgtcaggccatgctccccggctttgcgcaatctgaacccgcggcccgttacctgtcgcgatcgtgagtttgtcgcaccgtgtatcggaaaggagagtcgatacacggtgcgacaacatcccgccatgtcacgcccggcacggatacagtgcctctggaaggcagtgctgcgcacagccatcatcgggccggtagcccggcgccgcccccgggagaagagcgctgagtggcagaatacccggaggcggtgctgcgcacctgtctgggctacaggttcacagccatcttcaggccggtagcctcaatatcgtgacaacgtcacaaattcagggcaaaaaaccaataaaaaagccgataaggtgagttatcggctttcaaggttaatgcgaaaacaaatttactgcgccagcagctcctgggcggtacgctctaccagactcagcagcaccttcacgtcctctaacgtcacgatcgggttcagcagcgtcagcttcagacaggtgacgccgtcgtgctcggtcacgccgacgttagcgcgaccggaagccagcagcgcatcgccaacccgctggttgagcagggcgatcgcggcatcgtcgctgcccgccatctgctgcggacgggaacggaacagcacgctcgccagctgcggctgcatgaccagctccagcgtcggctgcgttttgacgtaatccgccacgttcagcgccatcgtcacgccgtgatcgatgatttccgcgtactgcttctggcccagcgcctccaggcccatccacagcttcagcgcgtcgaagcggcgggtggtctgcagcgatttggataccaggttcggtacgccgtgctcttcatcaaactcagagttcagataggccgcttgatagcgcatcagctcatagtgacgggcttcttttaacagaaacgcgccgcagctgatggtctggaagaactgcttatggaaatccagggtgatggagtccactaagtcaatgccgtccagacgatcgcgatacttctcggacatcagcagcgcgccgccccaggccgcgtcaacgtgcagccagatctggtgctcagccgcgacggccgcaatctcgcgcagcgggtcgattgcccccgcgtcggtggtgccggcggtggcgacgatggccataatctgttcgccgttagcctgcgcctcggcgattttcgctttcagatccgccacgtccatccgcgcgaattcgtcggttttcaccagcgtcacggaacggtagccgaggcccatcagcgccatgttcttctgcaccgagaagtgggcgttttctgaacacagcactttgtactgacgaatatcgcccggcaaaccatcctgctggatggaatgaccccggcgggcaaagaaggcatcgcgcgccagcatcaggcccatcatgttactctgggtaccgccgctggtgaaaacgcccgcatcgccggcgccgtagccgacttgagcgcgcagccattcaatcagcttgatctcgatgatggtggctgacgggctttggtcccaggagtccatgctctggttggtggcgttaatcagcacttccgccgcctggctaatcaccaggctcgggcagtgcagatgcgccacgcactgcgggtgatgtaccgacaggctgtctttaaggaagtactcgatcgcacgttcaatcgccgcctggttgcccagaccctgttcgttgaaatcaagggtgatgcgctcacgcagttcgtcaacgcttttcccctgatacatttcaggctgctgcagccactgcgctaccgcctggctggtctgggcgatcgcttgctggtaggcatcaatactttgcgcggaaccagcaagaatcggattcaacttggacattgcggtcacttactccactcagaccggttttacgccggcggccagcagggcctgttcaaatttgtcgaagaaaatttccagctcagcgttgctgatcagcagggacggcagcagacgcagcacgcagccgtggcggccgccgcgctcgaggatcagacccgcttcgaagcatttcttctgcagcagcgcggaaagttcgccatccgccgggtagcagcccatgtggtccggcgcttcgttcggtttaacgatctcgatgccgatcatcaggcccagaccgcgaacgtggccgataaccggatagcgtttctgcatctcggccagcttgcctttcagccattcgccctgagcggcggttttatccgcaatgttattgtctttcaggtggcgcagggtagtcaggccggtggccatcgccagctggttgccgcggaaggtgccggtatggtgacccggttcccaggcgtcgaactgctttttgataccgagaacggccagcggcagaccgccgccaacggctttcgacatcacgataatgtccggctcgatgcccgcgtgttcgaaggcgaagaatttaccggtacgcgcaaagccagcctgaacttcatcgatgatcagcagaatgccgtgttcctgagtcactttacggatgcgctgcagccactcgaccggagccgggttcacgccgccttcaccctgaacggcttccaggatcaccgccgccggtttacgcacgccgctttcgacgtcattgatcaggttttcgaagtagtaagtcagcgctttcacgccggcttcaccgccgatacccagcgggcagcggtactggtgcgggtaaggcataaactgcacttccggcatcatgccgttaaccgccgcttttggcgacaggttgccggtgacggacagcgcgccgtgggtcatcccatggtagccgccggagaagctgatcacggaagaacggccggtgtattttttcgccagcttcagcgccgcttccacggcgtcagcgccggacggaccggtgaactgcaggcagtattctttgccttcgcccggcagcagggaaagcaggtattcagagaagcgatcttttaacggagtggtcagatcgagagtatgtaacggcaagccgctggtaatgacactttggatgctctgcagcacatcagggtggttgtggccgagtgccagagtacctgcgccggcaaggcagtccagatactgtttattatccgcatcggtcagccagacgccttccgctttggtaatcgcaaggggcagcttgcgcgggtagctcctgacattcgattcgaattcagcctgacgggccaaaaaggtatcgttgtttgcatctaataaatctgcgcctaaagtatcaatacggactttatccgtcatcatatcactcccacaaccagcgttacggttgagcgctggttgaataaattggtgtaagaaattgaatcgccatgcattaaagcgggcacaatatatggctttttagatacgcattcaacgttttattgattaaggtatatttacgttatttttacacaggcaaaaaccaacgtaatcccttgatttaaatcaggtgttttaaaggataaaagacctttaaaattgtaattattagtgaggaagtttctcgttttttaatactgccgcgcggccattgctggcgaaaagtttccgccagcaatggcatgactcaatgcagctcaaccgcataattcgttaaaggtgtaacttttttcaccaacttattgttatataaaaactgttcataagcttcataccgtggtttatccagcgccgccggatcgctggcaaacagaggaagggttttcagccatgcctgcttgttcagttcggtgttgagctcgggatgcgcggcggcaaacgcctgccaggtctcctgcgggtgagcgcgcaggtaagcgacgcctttttgcagcgccttgaggaaggccctgattttcgccgcgtggacttcatcccggttggcgacaatcaccagctcgtcgtaggccggtacgccgtaatcctcaacgttcatcacctgcggatctttcccctgcagcttcagctccagcgcttcgatattacgatagccgccaatgaccgcgtcgacctgtccggccagcagggcgctggtcagctggaagttaacattgatgagcttgatgcttttgggatcgattttcgcatgctgcgccatggtggccagcgtcgcctgttcgatgccgctcaccgaataccctacttttttgccctgcagatcggcgggagattttatgcttttatccagcgcgatcaccgtattcagcggcgaattaatcagcgtgccgacgcggaccagcggcagcccttcatcagcaaaaaaatgcacctgcggctggtaggtaatcgccaggtccgcctggcgggcggcgaccagccgcggcggcagcgccgggtcggacggcggcacaatgttgacgtccagccccgcgtctttaaaggcgccaatctgttcggccaccaggatcggcgcgtggtcgggattgatataccagtccagcaccagggtgagtttctcgttggccagcgcctgaccgctgaacagcgcggcaatcgtcataccggcataaacacgtttacgcatggttagtccttttatttaagagcgttattccggcgtccagttaatcagccggtgtaagaaagcatccaccgccagccagagcaggacggtcagtagcaccagaataaacagggccgcaaagcagatatcggtttgcagacgggcgttggcgttaagcatcacgtagcccaatccttcggctgaaccgacccattcgccgatgatcgccccgatgggggcgacggcggccgccatccgcaggccggaaccgagggctggaagggcagccatcaggcgaacgtggcgcagctgcgcgccaaaagaggcccccatcgtgcgcgccagatcgagatagtcgtggttaacccggcgcagaccgtcgaaaaacgccgaggtgacgggaaagaaaatcaccagcaccgccatcatgaccttggcgctcatgccgaaaccgaaccacagcaccagcagcggggcaagggcgaaaaccgggatcgcctgactggtcagcaccagcggcatcagccagcgctgaaggcgaggcgagacaatcatgcacagcgccaggatcacgccgagcagaacgccgagcgtgaggccgctgaggatctcgcttaatgtgatcagcgtgtgttcgccgaggtacgcgcggttgacccacagagcgcttgctaccgccgcgggggaaggcagcaggaaagcgggaatgccgctgcgggtcgccagccaccagagcagcagcaggccgcagaacaccacggcggcgcgaaacagttttgcgctcatccgttagcccttatgagctgttgcagcagctccgcctggctggccaacagcgccgggtcgtccggcgcgcgcggcggcatgccggagaggtgatgcccgtcgtcaatcccgccgggagcgggggaaaggaccagcagacggtggctcaggcggcaggcttccatcgggtcgtgggtgatcagcacgacggtgcggtttaccagcagcccggcggccagggtctgaatgcgcgtgcgggtaatcgtgtcgagcgcggaaaagggctcgtccatcagcacgatgggccggtcttcgtagagcgtacgcgccagcgccgcacgctggcgcatgccgcctgagagggcggccgggcggtcgccggcgcagtgttcaaggccaacctgctgtaacagcgcggcaacccgccgatggtctacgcgctccccgcgcagacgcgcgccaagcgagacgttgtcgcgcacgcttaaccacggatacagcagatctttttgccccatccacgccagccgcttgtctattggctgcccgtcgctggcgcgaacctcaccggcggtggcttttgccagcccggcgataatacgcagcaggctggtctttccggcgccgctggcccccagcagcgatacccactggccgccggggatagtgaacgtcagattgtcgaagatctgccgcgagccaaagcgcaggcccaggccgtgcacctcaattccgggagccgtcacgccgggcgctccgtgacggcgttaaggcccatctgccagaagttagcctccagacgcgtggcggtggtgaaaatagcgctgagttcagcgaaacgcgcctcgccgccgcgctgctgccagagggtttccagcaggccgatggcgttattgacgccgttcaggtaaccctcatcgccgtagttgcggatccacgaggcgtaagtattgtcagctaagtgggtcgccggatcgtgcagcaggccgaggccgatttccgcgtagccggcaacgcagggcatcagcgccgccagcagatccagggcgtcgccggagtggccaatgtccagtacgtagcgggtgtagttgacggtttccgcggcttccgtttcggcggccatcgtcgcttcatccagcccccattcccggcagtagccaacgtggagcggcagttcgtcgagaatggcgttcatcgacgcggcggcagcgcgcatttccgccagggtgcgcagcttgctgaccagcagggcgtagctgcgggcgaagtggatcagaaacagatagtcctgcgtcagatagcggcgaaaagcgggctcggggagggtaccgtcggcgagctggcgcaggaaggggtgggcgacgtagtgctgccagtcggcgccggcctgctgacgcagacgaccataaataccctgggtaaacgcgggaagaatcacaggacctcctgaaaaaagggagatccgggcgtgctgaaagaagtgtgaacaggcaatggcgcaaaactggcggaaatgccgatccgtcccttcgctggcatgacccagatcaggttcaaagggttcggcttacgccatctcagccctcacgggacacccctcggtttggcccctgttatacgacattccctttttgattacaatgctgtgaattttatgaggaaaggtgacgttgtcacgtgtgagagtcgcgagaaagggctttttgcatcgtggcagcccggcggcggctgatgccttgccgggcgcgtattatcaaaggatcagtgaaattctacccagctggcgccgctgtctgctgaacgtacgcacttctcgacccagtgcacgccgagcgccccggctctggcatccggataccagaagttttccagcaaagccgcgtcgcgacggtcggtggcatccatggcgatggcaaagcggcgatacagattcgaccaggcctcaaacagcccttcgggatggccgccgccgatccggtcgtcctgcagggccagcggatcgagataggacattccgcgttcgaggatgcgcaccggctcgccctgaatttcgtagcgcagctggttcggctgttcatcccaccactccaggctggctttctccccgacgatgcggactttctgtccgtgcattgagccgctgttgaccgccgagcaccacatcgaccctacggcgccgttgtcgtactccatcagcacatgcgcgttatcctccagcggcgcgcggcttttgacaaagctctggcgggagcacatcaggcgagtgatattgagcttcggcgccatggtctccgccaggaacagcgggtgggtggccagatcgcccagcacgtagctggggccgacaaatttcgggtccacccgccagcgggtgctggggttatcctgctctaccggctggttatggaaaccgtgggcgaactgcatattgatgatgcggatctcgcccagcagcccctgttcaatcatctgccgcgcctgcagaatcagctgatgcccggcgtagccgtaggtgacgccgatgattttgcgctgtttttcgctcagggccaccagcgcatcggcctcttcgccggtaaaacagagcggtttttcgcagaccacatgcagtccggcctccagcgccgcgcggcaaatagcgtagtgggtgttgtttggcgtggcgatggagatcgcttcaatgccgtcttcccgcgccgcctcttcgcgaaacaacgtttggtagtcggggtaacagcgcccggcctccacgcccagctgctggccaaactcgcgcccgcgctgggggtcaatatcaaaggctccggccagcagggtaaacgatccgtcacgcagcgccgcagagcggtgaatatagccaatctggctgcttccgccgccgcccaccatgccccagcgcaaggagcggccaacaggtttaataccgttaatcatgtgttttctcccgattaaaaaccaaccgagcgcaggtagcgcaggctttccgtgaccgcctgcaggctgccctcgacgttgcgcggatcgcgctcttgctcaatggtgatccagccctgatagccccgcttgtcgagaaaggcgcgcaccgccggataatcaatggcgccgctgccgagcgggcacatcaccccctccgcgcaggcggagaagaagtcgatgccgcgggaaatcacgctcctgaatacctgcgggtcgacatctttaaagtgcaggtagtcaaggcgatcaaaatggcgatccagccagctgatggggtccatgcccgaatagaagagatggccggtgtcgagacataaaccggctacgtcatgggggatttgcgccgccagcagatcgatttcatcggcaaactcaatgcagccgccggcgtgaggatggataaccgggcgaacgccgtactcctgccacgccagtcggctgatggtcacaatgtggtcgaccatccgctgccagtcggcgggtgacaggcggggagccagctcgccgcgcccggcatatttcgcccgctgcggattgccgaaatcaataatgaccagataaggcggctggaaggggttgcccggcgtcttttccgccgacggcacctgcgacaggttgcggcagaggttatgcgtcagttcgacaatattcgcgaagttctcttcgctgaccagatcgtcgaagatcgttccggcaaccagcgacagcccctgtttattcagcgctgcgctgagttcatcggcccgggtcggcagatagctccacgggcccagttcaatgcttttataaccggcggtcgccgcttcttccagtaccttggaccacggcggcagataaggatttttgggatcatcgacgccccagctgcacggcgcgttggcaatatgtatggtcatgatggcttccttttcagatgaggagaaaacatgaccagtattgaatgaaaatttcatatccaacaatgatgaaatttaaattctttgatgggattcaaggtttattttgatagcgtaaatgatagttttttatcaaatgcagcactgaagcggggcgcggcgactttacccgcgcctgcggcaatcagaggttttctttagtgaggaggtcaaacggctgcagagcgttgataaacgccgcctgcggctggctggcggcgtggacaaacgcgttgatggtggcggcggcaaattcatcaagccggtgggtaagcatgagatcgatagtgccgtcaattagcgccagctcgccgctatccaccgggccatgacaaatcagggtgacctgatgctggcgctggcgcgcgcgcagggcggcgacaatcccttccacgccgccgcagggcgcgtaaatggccttcagatcggggtactgttgcagcatctcttccgtgacctggcgcgcgacatcggcgcgttcgtggctgcgcaccggttcaagcacccgatcgcctttgccctgttcacgcaggtaggagcggaaacttatctcgcagctttcctgacaaataaaccggttatcgccgacgataatgccaatttcgccgtcgtcgtggcacagcctgtccaccgcccaaccggcggtgcggcccgctttctggttatccagcccgatatagccggtacgctgcgggatactcatatcggagagcagggtgaagacgcggacgcctttctcgatggcctgcacgaccgcatggcggataagcggattatccagcgcgacaataccgataacgtcgaccgtatcgctcagacgggcgatcgcggcggccatatcgtcgatggcgttaatatcgtaatgcagaaaagcgggggcctgcgccgggctatgccacggtaacgccgcctgctccagcgcctgcgccagctgatggtaaaacgagtgtgactgctgtagcagaatgaagcccattctgagggctaccgccggccgatccgccgccagccgatagcgggattgctccagcgcgaagcctaagcgccgcgcggattccagcactttacgttcggtgctctctttcacgggcgtgcgtttattgaggaccctgtccaccgtcgcgataccgactctggcctctttggcgatatccgccatggtgactttttttgctgacatgattctcttcctttgagggtaatgataaaaagctatcattattgtgacaggcaaacagcgaggcgggtcagacttcaggaaaatcatttcgccgcgctggcttcattgacctgatattcaactgccagggtctacactaagtgcatccccactcaggaacaggatgttatgacgtattccctctcaaaaaaattcctcgccgccacctctgcgctgctactgctctccatgagcgcggtcccggccagcgccgccgccgataatagcgacgcggtctctccgctcagcgccggaaatggcttaagcaaagcggcaaagcagtatctcctgcgctatccctcccgcagcggcgtggacggcaaaaccgcccgcgaagataccgccgcggtctttattccgtttggcgccaccccggaagggggatggccggtcgtggtctgggcccatggtaccgtgggcgtggctaatcactgcgcgccgtcgttaaacccgcgcagcgatcgcgataagcagtacctgaacacctggctgtcgctgggctacgcggtggtcgcgccggattatgccggtctgggttcgtctggcctgcaccattatcttaatgcccgcggcgaagcgtggagcgtgcttgatagcgttcgcgccgccctgaaacagttcccgctgaaaaatgaactcattctggtcggacagtcgcagggcgcgcacgccgcgttcgccagcgccggatatcaaccccactacgcgccggagctgaatgttcgcgcaacggtgctgaccggaacgccgtattttgagaagaggaccaccgcagccgacattcttccgccggcaggcggcaaagcgccgagcggcggcgacccgaaaataccctatattttctatatttacctctcggctgccgatagcaacccgcagctcaatccggctgattatttccaggataaagcgctgccgctgctgaaagaggcgagcaatttatgcattacgccgctcaatgatgaagtgatgaaggccggtctgaatgcggctaatgccctgaagccgggggtggattcgctgttaaacgccagcgtgggcgccatgctctacccgacgctgaaaatcgatcacccggtgtttatcggtattggtagcgcggatattaacgtgccgacggcaatgcaaaaacgctttgcggacgcggtgaaaagcgcgggaacccgtgcggacgtgcatatttatgaggggctggatcatagcggtacggttaacccgtctttacgcgactcggtgccgtttttgattaagacgctcaacgataagcggtagcggcgaagggatgatgagccgccctgagcaaggggcggttcagtacaggtatggcgtcgattaccagtatttggggatcagatagccatacataacgacggcgacaacaatcatcagcgtaataattgcccagtcggcttttagtgattttaccgcgttcataagttcctctttttcaatgaatcaccgggtaacgttagcgccgtcgcgcctgcatgtaggtgatagagatcacataaaaaatatttgtcatacaaataaagtgtgtcaatttttttactattctcagcaatattttgtccgctcattcgtctacctccgcacagggtaattattcaatagcgtaatgaggtaaacagacgatgagagatatcgatatgcacggtcagcaccaccatcaccgctttggccgccacagaatggcgaagccgcttcttatcggcgtggcgctaatcgccatacttgggctgctggtgatgtcgctgtggaatgcgctgctgccggccatccttggggtgaagagcattggcttctggcaggcgttaggtgtgctggcgctgtcgcggatcctgttcggcggcctcggctttcgcccgggaatgttcggcatcggtaacgcgcggcgtcggatgcatgaacgctggatgaacatgagcccggagcagcgcgatgagtttgtgcagcgctttggccaccgcgggcatcgcggccgctgcggctggcgcgaccgccgcagcgagcatgctccgcagcaggagagttcggctaaaagcgcggatcccgagtgagcacaatgaaaaacaggatcgtggcgccatcacggcttgtttccgccctcgatgcctgccggtcgcggctgaaggcttttattcgcggacggaccccgctacgcgatgaggcggacgatatcctgcaggaagtgacgtatcagctcattcgcgtcgagcagccggtggagaatatcgccgcctggttgttccgggcggcgcgtaacgagatgaccgacagggcgagaaaaaagcgcgagctgccgctggcgggcggtttcagcgacgaggaggagggcgattttcccgaggatgagctggccgaaacgctgtttggcgttgcgcaaacgccggaggatgagtatctgaaagcgctgctctgggaggaattaagtcaggcgctctcggagctgccgcccgcccagcgtgaagcctttgagaaaaccgaactgcatggctacagctaccgggagctggcagaggagtccggcgtcagcgaacaggcgctgctctcacgtaagcataaagcggtactctaccttcgtacccgcctgcgcgcgctgtacgatgaactgctggccagttaggcgttctccggctcctgctgcaggggccggagaggtgcgtttaagccgctgattgaattattgcctgtagccccaggccgtgaggaaggcgctaatcgcgcattcggcgagctgctccagcctctctggcgccaccgctttttgcgcaattaaggcccccggcagcggatagcccataatcgcaccgagaaacgccgtcgcctctagctccgggtcgctgagggtcagcagaccttcgtcttgtttctgcgccaggatatcgctcagcgcctgcaatacgcggcctgaggggcgctgttcgagcgtgacgtaaagctcgggcttttgcaccagcacctggatcagcaggcgctgaaagtgaatattctccggcgcataaaagtgctgttgcaccacttttgcaaacccgcgcagcagcgcgggaagatcctgctgacgatcctgcaaaagctggcgcaggggcggctgcatggtgtcattgagaaacgcgaacgtctccagcagcagcgcgtctttgccgccgggaaaatggctgtacagggtcgggcgcgtggtacccgcttcggcggcaatggtatccagcgacacatcaagcccgtggctgagaaacagctcacgggcggtttgtaaaatgcgtgggcgggctttcattggccgcccgcgttgatttcccatcaattgagtccttacagtttgcgccctttaaggcgcatcattccttgctgtaccagcaggaaaaagagtggaacgaagagcaaggtcagcagcgtcccggtgagcataccgccgatcaccgcggcgccaatctcacgctggctggaagcgccggcgccggtagagagtaccagagggataacgccgacaacaaatgcaagtgaggtcatcacgatggggcgcaagcgcaggcgagcgccctccagcgccgcgtcggccagcgttttaccttgctgaaaccgcgccagggcgaactcaacgatcagaatcgcgtttttggcggaaagccccatggtcgtcagcataccgacctgaaagtagatatcgttttcgtatccggcgagcaacgaagcgctcacggccccaagaatgcctaacgggacgatcagcagtacggcgacaggaatcgaccagctttcatataaggcggcgagacacaaaaacataaaggccagcgacgccaggtatacccataacgtctgcactgaggaggtctgctcctgccaggataaaccgctccattgcctttcaaacccgctcagctcgcccaccagttcggacatcgtcgccatcgccgcaccggaactgactcccggcgccgcgtttccctgaaactgcacggccgacagtccgttaaaccgctggagcatttgcggcccggtggaccagcggaatgatgagaagctgtcgaaggaggccatgttgttactgtcgccgcggacaaaccaggcggataaattatccggcgtcgaacgccaggccgcatccccctgcatatacacgcgcttgacgcgcccgcggtcgataaaatcgttgatgtacacgccgccccaagccgcagagagggtgctattgatggcggcctgatccagcccctgggcctgggctttttgtctgtcgatatccacctgcagctgcgctttctcctccaggctgttaattcgcacggcgtccagcgtcggcgtttgcctggcggcagtgaggagggtggtttgcgcctcgatgagcgcctggcggccgttttccgcgctgtcctgcagccagagttcaaagccgctcgactgcccgagtccgcgtacggtaggcggcgacatgacgctgatggtggccagccgggcgttttttaaaaagtaccggttcgcccgcgcgataatcgcctgcgcgctgttctgttccccggggcgcgcgtcccagtgctttagttcggcgaaggccatcccgacgttctgcccgctgccggcgttgtttctgccggtgaccataaagatgacgttgaggttatcctcctcctcggccatgaaatagcgggtaatgtccgcgccgaccgcctcggtcatcgccatcggcgaaccggatgggagcgtaaactgaaccatcaccgcgccctgatcctcttcgggcagaaagccgctggccagcttctgatactgccagagcatcaaaagcgtcagcgtcagggccagcagcacaaagcggagcgggcgaacgattatccgccggagtatggcgaggtaacggttctggctggcggcgacgccgcggttgaaacaggtgaagaatcgcccttttttaaggtgcccgggtttaagcagatgggcgcacagcgtcggcgtcagggttaacgccaccagcgcagagagcgccattgccgagacgatggtgacgctgaactggcggtagataatccccaccgagccgccgaaaaacgccatcgggataaataccgcagagagaaccagcgcgatgccaatcagcgcgccggtgatctcattcatcgagcgcagggtggcttcaggcggggtaagatcctcctccgccatcaggcgttcaacgttctccaccaccacaatggcgtcatcaaccagcaaaccgattgccagaaccatcgcaaacagggtgagggtattaatgctgtagcccagcaggctgaggatgccgaaggtgccgagcagaaccaccggcaccgtgagcgtcgggatcagcgtagcccgccagctctgaagaaagaggtacatgacggccaccacaaaaagaatcgcctcaatcagcgtacgcaccacgctttcaatagagaccgtcacgaacggcgtgctgtcgcgcgggtaagcggcgacaacgccttgcggaaagcgcggcgtcaggcgttcgacctccgcccggatcttctccgccgtcgccagcgcgttagcccccgaggccagctgaattgagatcccggcggaggggaaaccgttgagcgtggtttggttttgatagttttccgcgccgatctccacccgggcgacatcgcgcagatagaccaccgagccgtcgctgtgggtacgcaggataatattttcgaactgttccggacgctcaaggcgggactgggtggtgaccgttgcgttcagatactgcccctccagcgtgggcagcgaaccgatttcaccgctggtgacctgcgaattctgcgcctcgatggcggcctgcacgtcggagggcatcagaccgtagctggtcagctgcagcggattgagccagatgcgcattgcatactgggcgccgaaaacggtggtttctcctacgccttcaacccggctcagcggctcctgcagggaactgacgagaaagtcgctaatatcgaggctggttaacgacctgctttggtcatacagggccaccaccatcaggctgtctccctgtgatttggtcaccgcgatcccttgctgctgcacctcctgcggtaagcgcgtgatagcctgattgacggcgttttgcacctgtacctgcgccatgtcagggttaatgcgctgatcaaaactgaggctaatgcgcgcctggcccgctgaactgctgctggaggaaaaataaagcaggccgtcgatgcctttaatctgctgctccagcacctgcgtcacgctgtcttccacggtttcagccgaggcgccggggtagtttgccgtgacgttgacgccgggcggggcgatatccggatactgttcaaccggcagggtcagcagggcaagggcgccggccgccataatacagatggcgatgacggcggcgaaaactgggcgaaacacaaaaaagcgagccagcatcgtggtgcaccttcggtcagttaagggatgcttgcagagcaaacacggcggatggcgcgtttatcgcatcgtcggacggaatcggggtaaagggcagcccatggaatgcctcatcgtggactttgctcatcaagaagtcgccgatctcagaacatgacgtcgtacgctggtactcactccacagatagtcgtaggtttgaatgctgaaaatattctgctgcagtaaaaagtgcagatagcgttgccgctgttccacgcgctggctaatgagcagggcgcgacagcgccaggcctcggacggttcttgtaggtgcgagcaggcgtcatagagcggggcgccctgcgcgggcaggctgggtaaagcggcgttcatcgcgcaggggaaaatggctaatgcaatgaaataaaaaagctttccccatttttctttgttaatcatcagattcactccgccagtttatttactttacagtaaagtaaataaactgtttaaacaagcgttcatctgtacgaagagtaaacggggaaagcgaggggggatgagcaggaaacgcctgctcaggatttaaaacatgccgttgccgctggcggttttttgcggaacgttctgggtcacgtcccagtgttcaacgattttatgctgctcgtcgacgcggaagatatcgataatcgcccgcgtcacgcccggctcgcgaccggtgacctcaacgtgcaggatcacatgatcgccgtcgacaaacgcctgcttaatttcgctgtgcgagtcgggatatttgttcttcaggaaggcgataaattgctcaaagcctgcaacgccgtctttcgccatcgggttatgctgtacgtagtggtctcccagatagggtctggcggcggcaaagtctttgtcatttaacgctttattataaaaatcaataacattctttttattcagctgttcattttcactgttgcccgcaaaaacggcgggcgtcagagcgcagaacaaggaaaaggcgacgatcgattttttcaacatacatcctccggtggggttgataccaggttcctggcctgtcaggtgagtgcatcagcttccccagcggcttttcaggtagttaacggcctgctgggtttgcggctgattgaggtaattctctctgaataaaatcgtgccctgaatttgcggcatggattcattcagatcaagctgctttttcagctccggcacgccgccgctaatcatccagtcaggttcgttcttcgatggctcgccaactttgtacagcgccacgccgatatagaggcgggtatgggtgggtttcaccacgtcagcccaccactttgccagcacatcgtagcgggccgcttcgcgggcgaaaggccagtaaatctgcggcgcgatgtagtccagccatccctgctggacccagaggcgggtatccgcatacgactcatcgtaggccgctgcgccgcgggtatccgaacccgccggatcgtgggagcggttgcgccagacgcctgccggactgacgccaaattcaacatcgggattcagctgcttgatggtgcgggaaacctgctcaatcagcagctgcgtgttgtgccgccgccagtccgctttcgcggcaaagccctggccgtactgctggaacgtccggttgtcgttaagggccgatcccggtgattcggtgtagaagtaatcgtcgaactggacgccgtcaaccgggtaatgctccacaacctcggccacgatgctggtgatccagtcgcggacttccggaatgcccggatcgagcacgaagcgatcgccggaggtgcgaatccactcagggtgcaggacgtatacgctggcgggaacctgcgacagcgtgctgttcagttcggtgacggttttcggccgcgtattgaccgagacgcgataggggttaaaccaggcatgaacgcgcatgccgcgcttgtgagcttcatccagcataaacttgagcggatcgtagcccggatcctcaccgattttgccggtcagcatatcggaccacggcagaatcttcgatggccagagcgcggtgccatccggtttcacctggaagaagacggtgttaatgccgaggctttttaaattatccagcttggcaaccagcgcctgctgctgcagggcgatgcggcgttcggcgctaatgccgccattgacggattccagcggcggccagtcgaggcgcgacacggtcgtcagccagacgccgcgcaccggctcctggcttttgggcaacgtcggctggcgggtcgcgggcggcatgggcgtgacaagagaaacgggcggtttgctaccgcagtgggctaacagcagcgcggcagctatagctaccgcggatattttcaccttgttcagaataaacttacgagagcggatcgtcatcatatttgccagcttttctggtcatcgcacaaaagagtcattttcgtattattcggctttaagtcaatcatttagctacagatgcggcggcataagcacgcaaacctcagacgcagaaaacgcctcctgcgccgcgcaatggtttgccatgatatatcattgatatgcattaaaacttgatcggttcagggcgagtataaacaggacttattaaaatttggccaaacaattgacctttggccttttccggcgagtcaaactggattagcacaatgaactactcatcatcacgccatcgtctgtggatactcctgtttctgattgcgctactgagcctgggcaccgggctttgctactggcaaatgcaaaaaaaggtggatcaagatatccattcgcgcctgcagcaggcgatagccagccttgatgtgaccgtctcccatgcggagcaggcagccgatcgggctgagcctttttatggtaaaagctgtagcgagaatgtcctgacggagctgcgtacgctggtggccaccattcccgatgtgcgcacggtgaatttaggtaaggataacgaaatatactgcacctcggtttttggcgggcgtaaatttcagttcgatcgtcgccagtatacgcatggcgctctgcgcctgctgagcggcagcgaaatcacgccgtttcatcccttgatggtttacagcgaacaggatgagcggggaaatacgattctggttggcgttgacggctattatttatacaacattttgaccgttcttgatggcgatgcgcatctctatcttcaggttggcgatcggataatgacccgcaaaggggaagtgacggcgacgccggatatcaaggttcccgtgcgcctggcctctgagctgtttacctattcggttattgccgaccgcggctacgcctctggcgtcggggcgtttatccgctatgagcaacacacgcttatcgccattattctggcctccttgctgctcacctttttattcagaaactacctccgctaccggaatacgattgagtatcagctcagaaaggctatcgaactgaagcagctcaagccctatattcagccgattatcaacaatgacagcggagcggttatcggcggtgaggtgctggtgcgctgggaacatccgaagcagggatttattgcgccggataaatttatttccgtggcagagcagaccggcttgattaaagacgtgacggcgatttgctttgccgaggtgatccgtcagcttcggcgccatcaatccgttatccctggagggttgtttatttgctttaacaccagttcggtaaactttcaggacgacgaaatagtgaccctgtgccagacgtttatccagcagatgaaagaggcgcaagtccgccttgttctggagataaccgagcgcgagtcgatcgagaatacccggcaaacatcagcggtgacggacaaactcaggcgtatcggcgtccagttttcgctggatgattttggtaccggctacgcgaactacagctacatccagcaatttaatcctgagattatcaaaatcgataaggtctttaccctcaacattgtgaccaacacggcttccgcgctggtggtgaagaatatggttaatctggccaggaagtttcattgccagattattgctgagggcatcgaggataaggagcagctcacgatgctcaaaaatatggggattaccctctatcagggctattacttttctaaaccggtgccggtcgatgcgtttattcagatgcttcctcgctcgtttagcgagtcaggaaggccctaaaggcgacgctcttgcctacgcaaaacacaggaaattaaaaggtgatcgactcggcaaaaccgagtaataatgacccgttcaagctgaaaatttgacattattgagaaacaactcaacaacatggaggttgtcttgtttgaatctcatctcaatatttttatccgcgcggttttcgttgaaaatatggcgctcaattttttcctcgggatgtgtacttttctcgctatctccaaaaaaatcgatgtcgcatttcgcctcggggtaaccgtgacggcgctgctggccattgcgacgccgattaacaacctgatttaccattatctgctgaaagagaacgccctgatcgaaggggttgacctgagcttcctcgatttcatcacgtttatcggcgttcttgcggcgctggtgcagatcctcgaaatggtgatcgacaaatatttccacgcgttaaaccatgctctggggccgttcctgccgctgttaactatccactgcgccattttcggcgcgacgatttttatggtgcagcgtgaatacagcttccttgaatcactgacttatggcaccgggtgcggtattggctgggcgctggcgattgtggcgctggccggcattcgtgaaaagctgaaatatgccaatatgccgaaaggcttacgcggtttaggcagcgtatttattaccgccggcttaatgtcgctggggtttatgtcgttcgccggcatctcgctgtaggctgcgctgaacgtcgggggagagattctgccgtccagaccctggggttgtacggcagaaggcgcgaaattattgcctcagcgttttactacgggtagttaaacgcatccggatggttctccaggctgccgctcagggcggcaaagagcaccgtcttgccatcgatagagcgttcatctccaacattcagccaagtcagtgtctcctgggcggttttttcgtcaacggcggaataaagcccggacatctctccggatttttccgaccacagcacggcgaagcgctccgctgcgcagtcgtggggcttgcagacgctgaatacctgatagacctcggcgccaagcttcaccgtccgggcaggcgagcccgtgccgccggactttatccaggcgggcagggtatgccctttaaccatctggctaaaggctgccggttcctttttggccagaccgtccagcgtcatatcggtttgcgccatggcgtgggtggatgcagccagaaaagcgatagcggttaagtgtttaagcataaaattgctcctgcgaactctctgattccgtttgatggccggtgataatggctctgattagctgtttttggtctgaacccaaaaagcgtggataaggcctggaatatagccgaggatcgttaaaataatattgaggataaacgcccaaccaaagcctttacccagcagtacgccaagcgggggtagaataatcgtcaacacaattcgccaaaaacccataatatctccctgttaagtgagttagctcataattattttagcggttgcgcctgtttttgcaaattttaactttttgaataataagactgctaatattacccgcgcctcgttactacatatttaataaatagaaaagccccaattcacctttctgacatatataagattattccagggtgaggcttgcgtcagcaacgctgacaaagcaagagtgttccatcgtaaacgcatttaaacgtaaataaggaatgcaggtaacgaggcgggaagtgcgctacactggcggggagatttatcccatcatgaaatggcggcggcatggacaacattatcctttataaagttatcgtcatcctgaccattgtcgggtggggctggagcatggttagaaggaagcagaaaaagcaggtcctggaacccactattgcgcaggcgaatgccagggagcgttatcagtggcgttatttcaggtggggctggagagttttgcaaatcgtctgcggtttttatttgctgattactctcatccagtttcttctctgcggctagcgttcgccgctgcggcgagctggaacagcgcgcgacagcggcgaacgcttcttttatgcgacgccggtaccgccgtctgagcaccagacctgaccggaagcgtacgagcaggcatctgaggcgaggagaacgtaaaggggcgcaatctcgaccggctgtcccggcctgccgagcggcgtatcctcaccaaactgctgaactttctcttgcggctggccgccgcttgactgcagcggagtccagtacgggccgggcgccacggcgttaacgcggataccgcgcggaccaagctgcttagccagcgatttggtaaacgccacgttgcaggctttggtctgggcataatccagcaggatctcactgggtttaaacgcctgcacggaagaggtgttaatgatcgccgccccctgagagagatgacgaagcgcggctttggttatccagaagggcgcataaacgttggttttaaacgtggcgtcaaacgcggcggtcgttaacgcctcaatggattcacaatactgctgcctgccggcgttgttgaccagaatatccagcccgcccagctcagcgaccgctttttcaaccagggtatcgcaaaatgactcaatccgaatatcgccgggaatggcgacggcttttcttccctcggcctggatcagcgcgataacggcagccgcgtcggactcctcctccggcaggtagccgatagcgacatccgcgccttcccgcgcgtaggcaatcgcgacagcccgaccaattcccgaatcaccgccggtaatcagcgcttttttccccgccagctttccggaaccggtatagctggtctctccgtgatcgggaaggggcttcatttcggatgccagccccgggggctgctgcggctgctcgacaaacggcggaagtggatagtgtagcgttgggttatttcctgttgtcataccggcctccttaataaatgaaatttaagattagtcaatgactgcgttggggcgataaaaaaagcgcaaaccaggaataattaacatcgtaaaaccaggaattatttacctggcttttaagtcaacatgtaataccagaacaacgcaatttcatctttttccggtaacgcgctgtagagataacgatcgtatccgcccagggtaaagccataatttcgatagaaaaggcaggcgggaacgttgacgttctgggtttccagctttaatcccgccgcgctcatgctccgagcccatatatgggctgccgccatgagcttgttggccgcgcccgttctgcgctgtgagcgctcgatggcgatataatccaccgaaataaatttgttccagatcaaggaagcggtgataaatccggccacttgccccgcgtcggtttccgcgattaaaaatatagcatccggattaacgcagtggttttccagcgtctggatatccagttcataggttttattataagtgctgggaagtgtttcaattttcagatcattattgacaaaggggccggtggcaatctggctgacggtgaaggaaaaatcacaatattccagacgagccaggtcggaatttaatcctttacgaatctgcatagcattccttgttttttaagcgatttattaatcatagacaacgcctttaaaaatatcagcctcgccagcaacagcgcacgcgtttaaacctggtctaatcttatattcatgccgcattttccacaggtcatttgaggatatttaatggaatccagagtatttaaaaaacattggggggcggagttcattgccgcgtacacagtccgctttcgcgtctgggccgaaggtcaaaaaacgatgacgctgagcctgacggggcgggatattccgatggacgccgcgggagagggctggttccagattgacgtccccggcgtaaagcatggtgatgaatatatgctccgtttagccgacggcacgcgcattccggacccggcgtcgcgcgcgcaacgcgatgatgttaacggcccttcggtggtcatcgaccccaggcgttttcagccggttaacgctggctggaaagggcgtccgtgggaagaaaccgtgatatatgaacttcatccgggcacctttacgccggatggcacctttctggccgccatcgaaaagctgccttatctggcggagctggggatcacccagatagaggtcatgcccgtagcccagtttggcggttcccgcggctggggttacgacggcgtattactctatgcgccgcacgcagcgtatggcgcaccggaggattttcacgcctttattgatgccgcccacgggttagggctatcggtggttctcgatatcgtactgaaccattttggcccggaaggcaactatctctctctgctgttgccgggcttttttcatcaggaccggatgaccccgtggggtaacgctatcgcctatgaaaccgaggccgtgcggcagtatattaccgaggcgccgctgttctggctgaccgaataccagctcgatgggctgcgctttgatgctatcgatcagattgaagatcgctccgccaggcacgtactgatagaaatagccgaaaatatccgcgccgcgattcccgaccgccatatccacctcaccaccgaagacagccggaacgtgattttcctccatccgcgcgatgagaacggacagacgccgctctttaccgccgagtggaacgatgactttcataacgccgcccacgttttcgcgaccggcgaaacgcacgcctattatcaggattttgcgcatcagccggcaaagaatgtcgcaagggcgctggccgaagggtttgtctaccagggtgagctttctgcgcaaaccggaaagccacgcggcgtggcctgcgccgctcagccgccgcagttttttgtcgactttattcagaatcacgatcagaccgggaaccgtgcgcagggggagaggctgatttcccttgccggcgccgggaaaacgcgcgttctgctcgccgcattgcttctgtcgccccacattcctttgctgtttatgggcgaagagtttgcggagacgaacccctttctgttctttaccgattttcatggcgacctcgcgaaggcggtgcgggaagggcgggctaaagagtttgccgggcacgcgggacacgatgcaccagtccctgacccgaacgatccccggacctttatccgttctaagctcgactggcagaaggcggcaagcgaggaggggaaagcctggctgcgcttcacgcgccaccttatccagctgcgccatcgctatattgtcccgctgctcgcggcgggaggggccgcggagggcatgatcctgcacgcggcggcgcaggcgctggcggtgagctggcaattctccggcggcacgctctccgtggcgctgaatatcggcgaggagcgggccgcgatgccggaaataccgggcgaggtcatttttagctggccggagcggcaggaggcgttatcgccaaacagtattgttgtccgttttgcacatggagaagcctcatcatgatcccttccgcaacctatcgtattcagttccgtaacggcatgaccttcgatcgcgcggcggcgctggcgccgtatctcaaagacctgggaatcagccatctttacgcttcgccgatttttacggcaaccagcgggtcaacccatggctatgatattaccgatcctaacgagatcgacccagccatcgggggccgcgaagggtttgaccggatggtcaaggcgctgcgaaacgcgcaaattggcctgattctggatattgttcccaaccatatggcgacctcgctggagaatcgctggtggcgggacgtcatcgagcagggcaaaaacagcgcctgggcccattatttcgatattgactggacgcgtcccgttacgctgccgtttctgggggatacctttgaggcagagctggagagcggggcgctcgcgctaaaacgcgatccggaaaccgggaagccggcgttcgtctactatgaccaggcctggcccctgaatcctcaaaccctgtcgacaggtgagcaactactaacatctccggatcgcgacgccattctggcgctgcacgaggcgcaaagctggcggctgatgtcctggcgggaagcgcccaggcagctctcctggcggcgcttttttgaaattaccggcctgattggcgtcagggttgaagacccggcggtgtttgacgacacccaccggcttatccttgaactggtgcattctggcatcgtcgatggtctgcgcattgaccatatcgatggccttgccgacccgctggggtatttgcagcgcctgcgccaggcagccgggccagagtgctacattacggtggaaaaaatcctcgccaaaggcgagcagctgcccgccgactggcccgtctccggcaccacaggatatgagtttatcgcttcgctggcggaagtgctggtggatgacaataacctcgatcagctgcagcaggttcatgacgaagcgctcggcggagcgatagatcgccacaccgcgctgcgcgaggcgaaaggactgatggtggatcgcaattttgagggtgaatttaccaccttattgcggctggccaccgagctggcggagcgtaatagcatggcggttgagagcgacgcgctgcgccatgccttgcgtgaactgctgctggccttcccggtctatcgtacctacggtaccgccgaagggctgaccgcaggcgatattacgctgttaaaccgggtggttgaccaggtgaacgccagggaagacaaacccgatgccagggcgcttgaggtcattatcgccatcctgaccggcaatctgcacgaaagtagcctcgacaccgcgtcactcttcagaacccgctttcagcagctgacggggccgttgatggctaaatcggtcgaggatacgctgttctttcgccataacctcgacctggcattgaacgaagtcggggccgatcctactcctcgcgcattttctctctctcgttttcaccaggagatgcgcattcgtcttgcccgccagcccgacgcgctgctgggaacatcgacgcacgatactaaacgcggggaagatgcgcgcgcccggctttacaccctgacggaagcaccgcagctgtgggcggaaaaccttgcgcgctggcgtcagatgaatcaaacccaggtgcgttttttgaacgacggtacggcgccgaacgcggcggatacgtggatgatctatcaggcgctcgccggcgtgtggcctgcaacgctgctgcccgacgataccgcagggctgaaagcactcgagacgcgttttcttgcttttatggaaaaagcgctgcgcgaggccaagcaaagaaccgactggatcgacagcaatgagagctatgaaagcgttgtgctgaactatgcgcaacagctgttcgctgcggataattcgctctttctcaacgattttcacaccgccctgcagccttttatccgtgccggcctggtgaacagcctcagccagacggtcatcaaactgaccgcgcccggcgtaccggatatttatcaggggagcgaggcgctgaacttcagcctcgtcgatccggataaccgacgtgaacctgacttcgccgtcctggcgcataacctcgatagcgaaggtcctgagttgtttaatagcgaaaacgcatggcgagacggacagctgaagcagtacgtcaccgcgtcgtttctcaggttaaggcagcggcatttcgcgctcttccattatggtgactgggtaccattaaaggtcaccggtgacagggaagagaatcttatcgcctacgcgcgcatcaacgacgaggaggcccttatcgtggtggttcctcgcctggcctttgacgtcgcggcgcacgggttggctgattccccggccaggctgtggggcaacactgcggtagccatacccgaagatctggcaggacgacattatcgcgatgcgttaaccggcgaaaaccgtcttgtcgaagaggcgctcgatctggcgtcagcaacggggtggttagtaacgcttattagtgaaaagaaaagtagagaggaatagtgtcaatgaaagaaacgtttgcaatagagcccggggacggccagcagctgggggctaattttgacggaaagggcgtgaacttcgcgctgttttcagcgcacgctgagcgggttgagctgtgcttattcgatccttgcggaaaaacggaaatagcccggcttgaactacctgaatatacacacgaaatctggcacggctacgtacccggtctgcagcccggagccttatacggttatcgggtttatgggccgtacgatccggagaacggccatcgctttaatccacataaattgcttatcgatccctacgcgcgggagctggaaggcgatattgaatggaacgatgcgcatttcggctacgagatgggccatgaggagaaagatctgagctttgatacccgcgatagcgcgccttttacgccaaaatgcaaggttgtcgacccggatgccttcgactggcagggggaaaatcgccccgacgtcccctggccgcatgcggttatctacgaaacgcatgtgaagggttttacccagcgcaatccggcgcttcccccggagctgcgcggcacatttgaggggcttgggcatcaggcttccgtcgattatatcaagagcctgggcatcacttccgttgagctgcttcccgtacactggtttccggacgatcagcatctgctcgacagagggctaaaaaacttctggggttacaatacgctgggcttcttcgctcccgcgtcccgttactacggacccacgggtatcgcgggcttccgcgacatggtgcgcgcatttcatgatgccggtatcgaagtgatccttgacgtggtttacaaccacaccgcggaaggcaatgagctgggaccgacgctctcatttaaaggcatcgataatttttcctactaccggacgatgccggatcagcatcgctattacataaatgataccgggacggggaacacggtgaatacctcgcatccccgggtgctgcagatggtcatggattcgctacgttactgggctcaagccatgcacgtcgacggctttcgttttgatctggggaccattctcggacgcgaacccgagggcttcgatccgcgaggcgggttcttcgatgcggtaacccaggatccggttttatcgaagcttaaactgattggtgagccatgggatatcggtcccgggggttatcaggtcggcggttttccgcctggctggggcgagtggaacgataaatatcgtgatacggtgcgggaatactggaagggggataatgtttccaatgactttgccgcccgtttactgggctccggcgatctgtacgatttacgcggccgtcgtccgtggtccagcgtcaattttattaccgcccatgacggctttacgttgaacgatctggtttcgtataacgagaagcataatgaagccaacggtgaggacaataacgacgggcataatgacaaccgctcctgcaattatggcgaagaaggcccgacggaaaaccaggatatcgtcgccgtccgcgaacgccagaagcggaatttcctgaccacgttattattctcccacggtacgccgatgctgctggccggcgatgagtttggccgttctcagcagggcaataataacggctactgccaggacagcgagatttcatgggttaactgggaagcacagtccgagcaggaccatgcgttgcgccatttcacccagcgtctgatagcgctgcgtgcggagcaaccgcttttacgccgcgaaagctggcgtgacgggctcgagatacgctggtttaacgccggcggcggtctgcagcaatctgaacaatgggatgaaggttcgacgttaggtctcgccatcagccgacccgaccttgaacaggaggagggcatctggcatgacgtgctgatgctgttcaatccctttgagggcgatgttccgttccagatcccgcagtttggcgaaggcggctgggttcttgagctgtcgaccgctgaagaaaaaacggacggcgtcatcattaccgagacaattgattttgttctggccgggcgcagcattgcccttttcagacggccttaaagcctcagacaaacccggcgctgaatgccgggtttatattgtcattattgatgcagcggctgaccactggcggcaaggatggattcatgcatggcttcagaaagcgttggatgagcaaagatcatcgataagagactctcatctgtggcctccagatgatgcgcgataccaaaaccctggatctgttcagtgacctgctcaccaaccatatgcgcgcccagcagttcgccggtttcggcgtcgaaaacagtctttacaaaaccctccgtctccccgctggccagcgccttaccattcccctgatatgcgaacttaccgatcttgattggccgtcccgtctcgcgagccttcgcctctgtcaagcccaggctggcaatctgtggccgggcataggtacaaccgggcacatagtcgcggttaagagggcgtacgccttcgacgccggccagcgtctcgacgcagatcgcgccttcgtggctggctttgtgcgccagacacggcgggccggccacatcgccgatagcatagagcccaaatacgttggttcggcaagctgcatccgtcttgataaacccgcggtccaactcgactcccagcgcttccagccccaggccttccacattaggctgtacgcccgctgccaacagcacacgttcgacttccagggtctgttcggcgccggtggttttcagggtgcagcgcacgcccgtatcggtgcgctgtacctgcgtcagcagcgtttggcaatggacgtgtataccgcgtcgttcgaacgatttacgcacggtagcggagacttcggcgtcttcaacgggcagaatctgcgcggcttgttcgaccagcgtcactttgctgccaagatcgttataaaggctggcgaactcgactccgatggcccctgatccgatgattaatagagactccggtaagcgctcaggctgcagggcctcaaaataggtccagattcgctcaccatctggctctactcctggcaacgctcgcggccgggcaccagtcgcaaggatcacatgacccgcgcgatagtctcgctcttctcctcggggatcggcgaccgtgacttgccccttaccacgcagccgggcggtgccggtaatgaccgtaacgccatttttcttcagcaggtactcgacacctccggtcagctgttgcgacacggcgcggctaaactgcaccagtttctgcacatcgaaactcacctctctgagactaaaacccagccgatcggcatgcgcaatactgtgcgccacctctgcaccatgcagcagcgccttggttggaatgcatccccagttcaggcagatcccccctaaatgctgcttttccaccaatgctgtacgaagccctagctggccggcacgaatggcggcgacataccccccaggcccgccacctattatcagtacatcatatttgtcgtgcatagctcgtctcctcgataaacaacagcgtcggtgtttcaaccagccgcttgagcgcctggagaaaagccgcgcctgacgccccatcgatgacccggtgatcgcaggacagcgatacggtcagttgatggcggacgacgatctgtccgtcgcgaactaccgctcggggctcgcctgcgccaatcgcaaggatcgcgccctggggtgggtttatgatggcgtcaaactgccgtactccgagcatgcccaggtttgacacgctaaaggtgccgccctggaattcttcgggcttgagcatgcccgcccgggctttggttatcagagaatgaatttcgtttgatatgtcgcttatcgacctgctgttggccgaacgtacgataggggtaattaacccgtctggcagcgcaacggccacggaaatgtcggcatcggcaaaacggcggatgctctgggtagcctcatcaaactgtatgttgacgtccggcacggctatcagcgccatggcgcaggccttaaccagcatatcgttaaccgaaatcttgacgccgggtacttcgctgttgatttccttacgcaatgctaagagtcgctccagatcgagatcgacggtcaaacggaaatgaggtgcatgttgcttggacatttgcaaacggccagcgatcgctcgccgcatgctggacatcggcaacgtctcaaaggctgtcgctgacgtggcttgtggagccccggcctggggtagcccatcaagcagcaaagcggccgccagcacatcatcacggctcacccgtccgagtgaaccgcttttgcggcagtcgtgcaggttgatccccagtttgttggccagacggcgcgccaacggggttgccgatacctggctatcatcggtatgcgatcgcggcgctttgccggaacgaacgggcggcggcggagaggcgatacggccgcctgcggcaacgatcgcgctctccaggtctgcgacagagatacgctcgccgcgcccgctaccctggacctttttcaagtcaacgcccaaccgcgcagactgacgtaacgcatggggagtggcattcacctgagtcggatccgttatgccttgcaggctggtgggtacctcggtctgcccaatggatgccgcaggcttattggcgggggccggtacaacggagggcgcgacggccgctacagcaggctcggtagtctgcgtgacaggcgctgctggctgcaccgcggccaggctggcggcaaaggcatccagttcagcatcgcttaccgaagagtcagctaccagcgccaaaacagcgccgaccgggagggtatctcccacccgggcgattatccgccgtagcgtaccggcgaagggggcctccagaacattgacgattttgctggtctcaatttcacagatttcctgccctttggcgaagcggtcaccctcctggatggcccaccgcgcgagcacgccttcctccattgaaaggccccacttcggcatttcaagtgtcctgatatcgctcatagcttaatcctccagcacttgacggacggcagcttcgatacgttcaacgccagggatccagagtttttcgagagcaggggagaacggtaccggggtgtgtggtggtgtcaccagaacaacaggcgctttgaggaaatggaatgcctgggaagcaatcagcgctgcgacatcatgagcaaagccaaaacgcgcggctgactcgtcgacaatgaccacgcggccggtagaagccactgattccagaataccttcttcgtccagaggcgagattgtacgtggatcgaccacctccaccgagatcccctccctggccagtttgtcggcgacctggtttgctttatgtaccattgcagacaacgcgatgatggtgacatcctcaccttcacgggtatagttggcgacgcccagggggagggtataaatctcgtccggtacctcgcccttgaggtcatagagcattttatgctcgcagaacaccaccggatcgtcgtcgcgaatcgactggatcagcagccctttgacatcataaggcgtcgatggcacgaccaccttgagccccggtgtggtagcaaaaatattatagggtgactgcgaatgctgggctgctgcagaaaaaccagcaccgatcatgccccgcatcaccagcggcgccttggccttgccgccaaacatatagcgaaactttgccgcctggttgtacagcgcatcatggctaacaccgaaaaaatccataaacatcagctccgccaccggccgcagacccgttgcagcggcgccggcagccatgccgacgatcgccgactccgtaatgggggtgtcgatcacccggtcggagccgaactgcgtccacagccctttagtgactccgagcacgcctccaaaggcctctatccttgcttcttcgggcgcatttccgccgtgaccgccgcgcaagtcttcaccaatcagaacgacgcgttcgtcgtgctccatttcctgggccagggcttccttgaccgcttctcgataggtttttataggcattgttatcaccctcagtatgagacgtaaacgtctgtaagcaggtcttccggagccggataggcagcggcgcgcgctttgaatacagcatcatcgacaagtgcttcaaccgccgcgtcgatcgccgccagttcctcaagggagatgtgttgtttgaccctggtggtgaaaatcttcagcggatcatgttgttcacgcagacgttgaacttcgccctcagcgcggtaaagcgccggatcgccctcaaagtgaccgtgccagcggaaagctttggcctcaatcacgcttgggcctccaccttctcgggcgcgcttgacggcctctgaggtggcatcgtaaacggcaaagaaatctgtgccatcaaccgtcactgccggtaaaccgaagccggcggcgcgcccggcgatatcacgaccaccgacggcgtaatcatggccagttccttcgccataaccgttgttctcgaaaataaagatggcagggagttgcagcaccactgccatgttgatggcttcaaataccaggccctgattagaaccgccgtcaccggtaaaagagaccccaacgttaccggtcttgagggttttggccgtcagagcagcgccgatggctaacggaggggcgccacccacgatagcgttcgcacccagcatacctttcgacagatcggcaatatgcatagagcctcccttgccccggcataatccgctgtccttaccgaatatttcagccatcatgccgtgaatatcgcagcctttggcaatacagtggccatgcccacggtgcgtggacccaatgaaatcagcgttagtgagattttcgcagacccccaccgcaatggcttcctcaccggtataaaggtgaatgaagcccggaatatcaccgctggtgttttcctgatgcaaacgctcctcaaacgtccggatttcgcgcatcttacggtaagcctggagtaaagcctgtttgttaagcatcacttaattctcctcagtaaaggtcgtcaggcgggggtttgacaggctggaagccccttaaccacgccgatgcaatgaatctacgagtgcgacgaggaggtgcgaagccaccttcatgggggggtaggagggggttttcatgcttgaggtcaaactttataaattttatgtatctatcgagaggggtggctccatgccatcccgggctctggcgtacaattgataaaaaaataatacgagtagataactacggatgaagccatcggatttgaaaagtcgccaggcaacttcactggtctccgggccattgcggctgacgagagatttgccgctaatcctgaccaaattcgttccaccacgctcttcgatacggctgctacagcgctcacggcttctgctcctcctcgatcgcatgcagcgacgccgtctgggcgtcgtttgcgcgggtgctggatttggcaaaaccacgctgttggcgcagtggtatcagcaaatgattgcccagggtgaacgcgttgcctggcttagcctcgatgaggatgatgatggcgtatggcagttcattccttatctgctgcaagcattgcggccgctctatggcgattgggacgccgacttttggcgcaacatagaagaacagacgccctccagttctcaacagctgctggccgggttgattaaccaactacattactgtccgcacgacctgtatctgatcgttgatgacttccatatgatcaatgatgctggtgtatatgaagccctgggatatttgctcaagcatgctcctgccgccttgcacctgatcattggcagccgtttccaccccagtctctctctgagcctgcttcaggcacaggaccagctggtggaaatctacgatcgagacctgcaatttacgctcgaagaaaccagacactatttcagccagacgattgacataccactcagtaatcagcatgtacagcggctactttccgcgacagaggggtggatcgccggcatgaaaatcgcttcgttatccccagaattgctcaatgatccagaacatctgctgcgcaatattcgtggtggaacccgcgctatcgcccgttatctgaaagaggtggtacttgacccattgccacaggaagtttttgattttctggtcaaaacatcgtttcttaatcgtttaaatgccgggttatgtaatggagttacagagcgtgatgatagtgaagcgatactggcatggattgagcggcacaatctttttttgtcagccctggacgaacaaggctgctggtttcgctaccatcctcttttgcaggaaaccctgcgaacaatattgcagcagaacaacgatatcaacctcaagcacttacatgaattagccagtcattggttcgttgagcagagattgtggtccgaggcggtacgccacgcactggcagcgggcaagccgatccataatcctgggcaggatggcgcgggcgcgcagtcgctggcggaagaaggggatatagataccctggtttcctggatgcatcacttacctgcgagtactgacccttcgcgcattgacctgcaaatcaatctggcctgggcgctggcgcactattttcgcttcgatgaatcgaggcagttacttgataatcttgaccaaatggtcgttaatcattgtgatgatataacccccaacgcctggctcaaattacgtgtcgtgcgcgcaatttgcgaagcttttgccgagaaaatcccggaaagccttgcgattgttgagccgttgctggctaaagtgccctgcggagacacctgggtcgacggtctcatatgcaatattctgagctactgccacgtggttaaccagcgctatagcgacgctcttgaggttcaacggcatatgccttgcccggaaagtccactagacaatctatttgtctcggtttatcgcgcttttatcatcactcagtgccatcttggtcagggtgacctggagaacgcctgggggcatgcagagaatgcattgcgccaggctgagcgttataccggccctcagtcgaccagcggcgcgacgcttgcgccgctgctggcggaaatggcttacgaacgtatgaatctggactcattaaatacgctgttagcagatagactcgaattcatcgatcggtttggtccacccgacgccctgagtcgctgctatacctatcttgcgcgtcaggctttgaatgatgatatgccccatgaggcagaacggctgctggaacacgcgcagcgactagcggtatctcgcggatggcaacggccgcaggctttattgttagcagagcaggcgagagtgcgcctgcagcgcgcgaattatccaggcgcggagcagctgcatcggcaactcgaacaactggcggcccgtgccacaattgatgccgaaaacccctgtcaacgcgcaatagctcagcatgccaatgtcagccgcagtcgcctgcttctggcgtcaggccaggcgccacaagccagccttttgctgggcgaactcgtgactgagcaggagcgtcggggcgaccggctctccgcagcgcgtcttcgtacgctatggtcattatccttgtggaatagtggcgaaaacgcggctgccgtggctgcattgcagcccgtcctgcaattagcggcacaacagcatctcaaacgtatttttcttgatgctggcgatgccttgcagcctctgcttgtccgtgtacgcgaaacctcggcagccagcgaaggggatgacccttggcccgggaaagggagcgagtctgaaggcaagcggattcagcatgaaaaccttgatgttaaccaggagctcagtgagcgagagctgcagatattacagctcattgctgacggtcagatgaacaaagaaatcgctcgctccctgactatctctactgagacggtgaaatggcacatcaagaacatctacaccaagctcaaagtcaatagtcgtacgcaagccatgagtcgggctctggaaatgaagttactggattaataatgtcagtgatgtgcgaatataatccataagtgaatatgtcagtagcatctattggccctttaataaacataaattccagcgccgtccgtcgctacgcaactcggtgatgctcagcgggtggatgtcgatacgcgcaaatgagtgaagcggggcgccgagaacgtcgacgatcgtggcgcggattgcggcggcaggcgcaatggcacagtggcgacctcgaatatcgacgtgtttagccagccagctgccacagcgcgccagcagctgagcacgtgactctccgcccgggggagcggcaccctccagccaggcctggaacgcttcggcgtcttgcttcatcacctcacgcactggccgaccggcccagatgccgtagtcgggctccgccagttccgtcactggcgtaccctgtaaagagagcgcggcggcggtttgcctggcggcgacgtccggggcgaaccagacgcggtgataacgggcggcactgctttgtagctggcgagcccgttgccactcccgcgcctccagagggtcatcacagggaaagtgtgaacctctggaggctgccgtttctccctgacaaatcagcgttagcgacgctctcatgttgttaaccgcgccggaaggccgggcgatgttcgcgtgtcgtcggcgtgcgttcggctaaagcaccgaaagccacgccgatgacgccccagagcaccagatgcgtgccgaaggaacttatgcggaaacgccatagcaggtccgccgggaagtggtcggagacttcgttcactgtcggcatcagggcgcaaaccacgagcatcagcgccacggcgaacagcgttgcccacatcatcgcattccctctgccgaggcgcggcgtgagctgatgcgataaccacgcggccgcgatgacgatgccgatagaaagcaacatcatgacgaaatagagtccggtacgatagccgatggtctccgggttgccgactgcgggcggattgggcgggtatttcagacctggcatcaggctcattgccaggaagccagccagcgccaggcacaacgccagcacacgcgggtccgatggcccaaagcgctggtagctaaaggcccacgccagcgccagaccgccgcccagcgcggcgccaaacagcgccatgccggtcatcaggccgatcccggactgggtctgtcggctaaacacctcttcttcttcgccgtctgctgacgcgccgtgatggtgagcgtgagctgacatgcttttttccaggccaatcgcgcgatcgacctgcggctcgccgaaatggtgcgcaaaggcaaatgccaccatcccggccagaacgccggccatcatccctttaaataacagtttgccaatcatttccgcctcctcagtggcagggaaagcccagcagatgacgtgcgtcgtggaagaattcatgcacctgcgtgccggaaaacatcgacgttgcgccttgttctgcgccaacgaaatagatggccagcagcgccagcagggcggtgaacagcgcccagggcaacagtttcgcgacaggaatgggagcagccggggtgtgggcattaagggtgatatcactcatggtgtaactccattatcgattttgctgttgatagagagtgccggactcaccgtgaccggcacgcccggcgaaaggtgatgatggctatgtgccggcgggcaactggcgttcgccagtacaatcggctggccgtggggcgtgttgagatacgctttgcgccactcctgcgtccgtcggctgatttcatccggcaccgtcaggttgagtgccgtcatcatgttttccatcgccgccgtccactgacgatagtaggcatcattcgcgctttcacccggttgcgccggcaccgcgttgatctctttactgaatgtctgtacccattctgcccacgggaacagcccggcccggtggagatggactatcagggagaacgcttttgcctgccagggcttatcaaacaccggcccttcctcatcgcgcggtaacccgagggcggcgtaatcgtgttgtgctaccgtattcatgcttcctccagatagtcgtcccacagatcgatgaacactttgtcagggcgcggctctccccacagcgcctgcgcggtgaaactgacgctgtaaacatgctggggatgttctcccagcccgtgcgccgcagtatctggcgtgataaacacaccgtgagcgatctctatgcgaccgactttatcgcgtgcgtagcgtggcaggcgggtatgggtggtcgggttgaaatttttcgttcgtacccaatcgcccacccggaagcggggcgcaacatcgtgactgacccgagcagacccgccggtgctgacaaccatcgacaccatctcctgcgtcagcacaggtgtaccaggcttgcagggggcaggcttcgcgccaccccacagttcttcaacggtgatcgtcccctttgccagcagcagcgtttcgaatgcatgcagccagtgctcgtagtaacttgactgcaaatattcggtcggcgccatacgttcgatggcgtggcgaaattcatcgacgttaaagtgtccgccgacgaacaacgaggcgaacagaggaaatacccggcgttcccactcatgatggaaatagggctcgttttcctcggtagggatcgggccaaggccgtgcatcccccccagatcatgtatcccgttcatggttttctcctttcgttatggtgcgctaaccacaccggtgccaatcatcgaatcgcgcgtgatgagttcgctcaactgcgcttcgctccagccttccgtgcctgccggacgttctggcaggaccagatagcgcagctcggcgctgctgtcccagacgcgaatctctttgttttctggtatgtgtaacccgaactcggcgagaacgccgcgcgggtcgatgacgatacgcgaacgatagggcgctgatttgtaccacaccggcggcagacccagcaccggccaggggtagcaggaacagagcgtacaaacggtgacgttgtgcacgtccggcgtgttctccacgaccagcatgtcttcgccctgtattccggagaaacccagttcagcaatagcggcagtggcgttttccatcagtcgacgtttgtattccgggtcgctccacgctctggcgacaacctgtgcgccgtttcgggggccgactttgtgctcgtaggtgtcaatcagctcatccagcgcagctgggtcgatcaggcctttttcctgcagcagggattccagtgcgcggacgcgtagctcgatattaacggggggttgggtatggtcgtggtcgtgtttatggctcattttaggcttcccgagagttaaggttaaaacgtccgccagtcaccgcaggcttcgaaagcggcggcggcctgatagagcgtgttttcagcgtaatgacgtcctaccagcatcatgcccaccgggagtccgtcgaccatgccacaggggatagacatggccgggtgaccggtgatgtcctgcgcagcggtgttaccgatcatttcgaaagcgcgcgagatgtattcggtgatggagcagtccgggtctggtatcggctgagcgaggacaggcacggtaggcatcaccagcagatcgaaatcgctcagggcccggtcgtagccggcgcgggcccgacgcgcgatattctgcgctctggcgtagtagcgaccgttatagcgctccagcccatactggccgacgaacatgcaaactttgagcgacggggagagggcatccgcgctgtcgcgccattgcgcgtgtttgtccagcaggctgacgtcgtactggccttcccagttaaaacccatgccgttgccgtgcatcatctgggcggtcagaccttcgcagccgataggcgaccaaagcgcgcccgccagattgtgttccggcacggaaatttcgctaacgatggcgcccagtgcttgcaggcgggcgatggcgtcccgcaccttcgtttctacctgcgggtccatattcggcaactggaatccctcggtcagaatgccgattttcaggccgcgcacaccttttccgagggcggcggtatagctctcaacaacgggcgcgtactgacgcgggtcaagcccgtcacttccggcgatggtttccagcatcagcgcgttgtcgcgcacgttggcggtgatgggaccggcgtggtcgatggtcgcctcaatcggcatgatgcccgtgtaaggcaccagaccgtgggtcggtttcataccgtaggtaccacagaaggcggaagggatacggatggaaccgccctgatcgcagcctatcgccatgtccacttcgccagccgccaccagtgcggcgctgccggaggacgaaccgccggaggaatagccatgacgatggggattgtgcaccggggccgggtcggaagtgtggctgccgccggagaggcagaagtgctcgcaggtggctttgccgagaatcgtcgccccggcatccagcaggcgggtggccacggtcgcgtcgcaggatgggacgaaaccttcgagcgtggaggcgccgttcatcatcggtacgccggcgagcgagacattatctttcagggcgatggtccgcccggccagcgcgccagtcgctgccccttttacctccgttttgtaataccaggcattaagcggattgtcctcgccagtcggacgatagccggcggcgcgcggatagcggacctccgggatatcgtcgggaagggagtcgatcagatcgtaggcgtcgaagttagcctgcatcaccgccagatattcctcggcctgcgccgtcgtcaggctgatatgcagccgactggcaagctcctggagttgttcagcagtgggacgttgaatagccatgttgtttccttttttctgtgtttgctcatgcgcctgtcttgaacataagcccggaatgccatcctgacttggttatccgggtcagtcgtttggctgaaatggacacccgcgcagcctgtgggtgtccgtaaggtgttaagacggcttatcggctttaggccagtggataccgacacttttcatgcctttggtcacgtccatgtccggatgtgagagcaccacgtcgcgatacgaaggactgccgatgaccgcgggcttgaattgagtcaggaaagcggtgacctcttcacgaatatcctgcggcacattgaagttttcgtaacactcgtcgatagactcgaatacggctttccagtgcacttcggtcagccccatgccgcggtgcgcggtcaccatatctcgtccccgatagacggtgttgccaccccagtgcttgcacaagaaatcaacgaagttgatatgctctttctgaaatgaagactcggacacgtgcgcccagatatggccgatgtcgggatgcttcatacaggtcttcaacacttcgcctgcgaaggcgtagacggcgtcatatccgccgagacgttcatagagagacggcttttgctgctgttcgctcatggtggatttctccgtaacatgtgagtggaagggggtgcataggtctctgttcaatcagaacagtttcatcacgcgcagggtggtgtggagatcttccttaaaaccgccatcgacgttgatgtcgcgttggagcaagccctgcacttgcaccgtaggggtgatgaatttcgacaattccagccttacctgatccgaacgcgtcgcttgtccgttttcgacgccgtcgatctgctgtttaccgccccacaatttggcgtaaccggcggagacggtccaggaggtgtctgcgggcggcgtccagcttacccagccctgaaattgataggtgttgtcttgtttgaggcgaccggtgccgatgcccgtggcatcgtcgttgtcgccataccacatcgcatcagcggacagctgcgtggcaaaaccgttaccaagctgctgcacgccgccaagctgcagatcgaacttccagcggttctcaccgacgttgagcgtgcgcccggcatcgtaggaaccggcagggacgtacaggtagggcacgagggcgaaggtggtgctggggttgttcaccagccagaccggggcggccagaatggggtcgcccaggccgctggcggaatcgaggcggacaccgcccagagagccgttataaagacgtccgtagggcatcagcacctgcggcgcgaccgtgaagccccccacatccatatagtggacgtaacgaaagatgctgacgaaggagtccatcccggtgccttgcttaatttcgtcgccacctgtgggggtaaagctgtctcgcgtggcgtaggtgaaatacgccagaatggcatcggtaccggcaggagccgggatgagatcctgtgagttgagatcgaccgcatgggccgggatcgtcgccagccagagtgtgcaggcgaccaggctgatacgagatgtggtgccactaacagtcataacgttaccctcatgtctgatatctcttgtttatttcccggtaccaacgtggccggaagaccttacggttacagatattagggagaaatttgctgcgtacttgtttcataaggacagtcgtttggctggcagggacaacgggcgggcaggctgaaaaggcccatagcgtgatgctccgtcatagcgcagatgtgcacaccttgagtgcggttctcgctttttcgacgccattcgcgacgtgggacgcctggcgcatcgacggagcgtcagtaatatttccgctgccttagcgcggatgcgcgagtgagagcgggagggacatctgagtgctggcacgatagttgctatctgtgaacccgtgtctgttattgatgcgggaattaaggtgcgaggtgagcaattatgaatagcatcatgccgtctgcggtctgctcccactattcgaccattggcgttgccgagtcgcgccgcttcgagtattggaacgacgtggtgttgcgtcactgcattccggccgccagcgtgcccatggctggggtcgactttgacgcccggcttgcggtacgcggggtggggatggtggatatctgttcgttgttcgcgccgttgcaccgctgggaacgcaccgcacgttatctgaggcaggggccagacgacgatctgtggctgggctatatgcaaggcgggtacggccagcttgaacagggagggcgcaaggcggcgctggcggcggatagtctggtgttatacgacgccgcgcagacgttcagtttcagcctgggtgggggcgataatcacctggtgcggatcccgcggcatctgctgagttgtcgtttgccgaggattgaaacgctcaccgctatggtactggacgacagtcggcccggcgtgattccactgcgtgaaatgctgcgtcaggcgacagcgatgcccgcgtgtctggacaacccagatatttctggccgtttctcccagacgatgctggatctactggtgctgagtctggaattgcaggatctggataacgtgagtgctgagcgcgatctgtacgccaggatgatgatttatattcggcggcagcttgtcgatccagatttgaacattgagagcctggctcgggcgcaccatgtttccattcgcaccgtcacgcgtgctttcgcccgccacaaaaaaacgccgatggccgtgatttggcaggagaggctgcgagcaagccgagaggccctcgaacgcggacgagtcagtagcgtgtcccaggcggcgctggatttcggcttctctgatttctctcatttcagccacgccttccgcaaagcctttggcatctcgcctcgctcattattgcccaaagagcagcagggagcgaggccatcgaacaggcacaccgggtcagactcctgagtctgcgcgatatgagtgaaagctgcgcgtgacggaaggcgctcccaggcgttgcggcggcaggtggatgacacgatggcgttagtgttttagcgacgggaaatgatttgaatatcccggcttagcgcggggtaagggtatgggggcgcattgcgcagactcggcttctttaatcgtatttaacataatatacattatgcgcaccaatatagaagtagcaagattatgcggctttgatcagaactcagttaaccatcccgggattctgctctggcccattcagcgcagttttttactttggatgaagttaacctatgttgtcgaccggcacctgacaacgcagatggccgcgcagcgcctgggtatctccgctggtcagtgccggcgtcttctgtcgcgttaccgtgaatctggcccgccaggtatggctaaccgccgtcgaggaaaccccagcaataaccagctgcctgatggttttgcacagtatgcgctcaatataatccgagatcgctataccgactttgggccgacgcttgcatatgtgaaactcgcagaactgcacgatgttcacctgtccaaagagaccgtccgttcactcatggtcaaagccggtctccggatcccccgcaaacaacgtgcgccgaaaattcagcagccacgctatcgccgggcctgctgcggcgaactgatgcagattgatggctgcaagcaaccatcgctggttcgagaaccgtgcacccgcctgtaccgcactggtctacgtcgacgacgcgacgagccacctgatgcagcttcgatttgtaaaaccggaatcgacattcacctattttgaggccacccggggctacctggaaaagcaggatcacattatacgatggtgtaaagaatccacagattggttaagggaagttattatgcttcccttaatgcacactttaagaaagttgcaagctattcatataaggtatatatgaattttattcaataggtaaattgtgctgttttaagaaagatagcttatcccaatagcctctttgaaatataattttattatttactatttgaaaaaaaccgcaacccctcaaacctaatggggcacgccactctaaaattgcccattgtccatcttcgaaaatgttttcaacgatacaaaccatttctggaaaagaaaagtcttgttcaaacattttctttatagcctctttcccaataactggctcattggctacctgatgatttattgcattatcatcatataattctgaaatagtttctacatctgcattattaaatgcgtcaacccattggcaaagtatttcttttggcgtcatataaattacctccagacctgtaaataatccttttccatagcataacatcaaaatcctatcaagctcaaaatttattggcacgctcgatgccatgttcctcgactacgaagcggccaaagattatgcgacccgctccaggctggtcacggcggcgaatatcccttctttcggagcgccagaatgatgttggtctggccggattttcatatggcgggaaccacgttgtgtctcaaaatctctgatgttacattgcacaagataaaaatatatcatcatgaacaataaaactgtctgcttacataaacagtaatacaaggggtgttatgagccatattcaacgggaaacgtcttgctcgaggcagcgattaaattccaacctggatgctgatttatatgggtataaatgggctcgcgataatgtcgggcaatcaggtgcgacaatctatcgattgtatgggaagcccgatgcgccagagttgtttctgaaacatggcaaaggtagcgttgccaatgatgttacagatgagatggtcagactaaactggctgacggaatttatgcctcttccgaccatcaagcattttatccgtactcctgatgatgcatggttactcaccactgcgatccccgggaaaacagcattccaggtattagaagaatatcctgattcaggtgaaaatattgttgatgcgctggcagcgttcctgcgccggttgcattcgattcctgtttgtaattgtccttttaacagcgatcgcgtatttcgtctcgctcaggcgcaatcacgaatgaataacggtttggttgatgcgagtgattttgatgatgagcgtaatggctggcctgttgaacaagtctggaaagaaatgcataagcttttgccattctcaccggattcagtcgtcactcatggtgatttctcacttgataatcttatttttgacgaggggaaattaataggttgtattgatgttggacgagtcggaatcgcagaccgataccaggatcttgccattctatggaactgcctcggtgaattttctccttcattacagaaacggctttttcaaaaatatggtattgataatcctgatatgaataaattgcagtttcatttgatgctcgatgagtttttctgatagttagtctttatagagacacaaacctgaaattccggacaccgcgcttcaggacatctccctggacgccgatatctggcagtatccggacggtactatcgaacgccgggccaacggtactcccctgccctttatgactgacgaccggctatctcacccacgcacttctccatgaaatttagcatcgtcgcggttaatgtcgaaaatttgccacctgacgtggttggcatcgagggtgaaaactgccgtggcgagggtgttctcctcatccggatcgtcggcagccagccggtaaattggcagttcggcgtcatgggtatctgagagaatgttttttgccgccgcggcgtcaaacggaggttgcgtttcccgccactgcacgaggcgtaactgccgcgacgctgaactgtcggtaacgatctgctcaacgccagccagtgccgcatgcaccagatggttggcatgcccggctaccgtcgtcaggggtagaacggagcagccttgcccggtggcctcaacgctgaaaagccgcgcatcgcccagttgcccgagcgtatggtgaaacgccccggatcgcggctggccggtaagtatagtgatggtctcgtcgagggtgttcgcattcagcgaggcgcgagccaggatctgacgcggtaatccctgcggacgatgcactgcacggatgttattcaccgtgttaacgatacctttttcattcaccgcaaaggtgtggccgcaaatcgatcccggataggcaaaactcgtaaagctcagaccgcgactcggagtaatggtagccagcaagcattcatcccgtaactgaggaaaaccgtcttcattatgcgcgataatccgctcgcctgcggcgtttaccccggccaccgtcgtacagccatccgacgttgagcgcaccagatcgccacggcagttccaggcaaagacctgatcaacagtggcctccagtccctgcgccagcccctccagctcctgccagatgtgcggataatgcctctgcgcctcggcgcgcattaaccgggtctcaggggatgcctgcagagtcatcaccgtttgccacaatgacgtgagcatcagtttctgatgccatgcttcacggccaagctcgccaagacgaaggccaatctcaaacggggaaccactgatgtcgattttcttcatgtgatggattcacttatgttcatgaaacgtgctgtaaaaattctttcaggcgcggattgctactggcattcagcaggatatcaggtgggccatcttcagcaatggttccaccatcgataaaaattaatcgagaggccacatcgcgtgcaaagccaatctcgtgcgtcactataaccatcgtcatcccttcatccgccagtgaacgcatcacttttaatacttcatggcgcaactccggatcgagcgcagaggttggctcatcaaacagcatcattttcggtttcaccgccagcgcgcgggcgatagccacgcgctgctgctggccgcctgaaagctccgacggatagtgctcggcccgttcgcccaggccgacacgttccagcagcgccagcgcctgttcgcgggctgccgcttgactcattttgcgtacgcggataggcccaaacatcacattttccagcgccgtcagatgcggaaacagatgaaactgctggaataccatccccgcttcgcggcggatttcgcactcgttgacgtggggatcggtcaggtgcatcccggcaaccagcaaggtgccggaggagatctcttccagcttgttgatacaacgcagcagcgtcgatttacctgaacctgaaggaccgataatcacgaccacttcaccggcatcaattttcagattgatatcgtgcagcacctgggtggtgccgaaatgtttagcgaccgcgctaaattcaaccatgctcataaaatatggatccttttctccagttgcttcagcaggaagctcaggcacagggtgacggcaagataaatcagggctaccgctgtccagacctcaagggcacggaagttcccggcgatgatctcctgcccctgccgcgttaattccgcgacgccgataacaatgaacagcgaggtgtctttaatgctgataatccactggttgcccaacgccgggatcatgcggcgcagggccagcggcataatcacgtgccatagcgttgcgcgctgcgataatcccatcgccagactggcttctttaaatcctctattgatggacaaaattgcgccgcgcgtaatttccgcaatatacgcgccggagttaataataatggtgaccatcgcggccgtgatggggtcaatacgaacaggcagaatcattggtaaggcaaaatagataaacatcacctgtaccataattggcgtaccgcgaatcagctcgacaaaaattaatgataatgttttcgcgataccgcctcccagtgcacgacagattcctgccagcagaccgatgataaagccgcccgtcaaaccgaccatagagatcaatattgtcagctgcagcccctgtaataatagcggcagcgattcccatatatatttcgtttcgaaattcataatgcggtctattactctcggttctggccggggttacccggcccggcggggattatttaggttgcttgttaaaccatttgaaataaattttgtcgtaggtgccatccgcgcgtaatgcctttaacgcggcatcgaccttcggcgtcaggctgctgtttttctgcagggcaaaaccgtatttctgcggcagaatgctgtccgtttccccggtcgattttaccttaccgccacctgcggttttcacgtagtagagcacgttcggggagtcgtgaacgaccgcgtccagattgcctgcctgcaggtcgagataggcgttatcaatattggggaattcgacatagttggctttatatttggatttcataaaactggccgcggcggtgccctgcttcagccccacttttttaccggccagctcgctgaatttggtgatggaatcatcaccacttttcaccgccattaagagatccgcatcgtagtaaccgtcgctgaaatcaacgacctgtttgcgggcatcggtaatggtgatcccggccattgccacatctaaattacgcgattgcagcccaggaattaaaccgccgaaatccatagggcgtaattcgtagctgacattcattttcttcgcaatggcttcccataaatcgatatcaaaaccaacatatttattgccttgcttaaattcaaagggaacgaaggcggtatccacaccgactaataatttatcttgtgccatgacggtaaaactcgccgaacaggcaaccagtgccagggtaatctttaattttttcaataatgcagacataataatcctcagcgtaattaagacagcagacaggagttttcgcgcaataccctaaaactgatattggcgttgagaataaaaacagtatccctacattcgcacgcgatataaaaatgaaggcgtgcgaattatttatgcgggaagaataaaatccctggtgtcgggtactggcgtctgcgcgccgttcatgatcattgaaagaaagctgtaataaccgttgatgccaatcagatcgacaacgcccttttccccccagagatcgattgcctgttgccagatatcatcgctgacttttttatgctgatgcagctgctggcaaaaatggtaaaccacccattcatcagccgccagcgtctctggttgacgccgttcattgattgcctgcaccgcctgcgccgggatccctttttccctggctattggcgcatgaatggcccattcaaccggctgcgaccagtgacgcgcggtcagcaggatggccagttccgacaaccgctgccccagcgcgctacggtagcgcagatactcccccattcgctgcgcatgggccatcagttccgggctgcgcaacaacggttcaaacggcggcagcagcgcgccgcgcggcccgttgataatctcctccgcaagctggcgttgttcatcgctccactgctgttctgacagcgcaggtaaacggttcatggctgacgtctcatcagtttatgcgtctcttcgctgatgaccttgtgcagggtatccaccacgaaatcgagttctgaccggctgacaataaacggcggcgcaatcagaatatgatcgccccgctggccatcaatggttccgcccatcggatagaccagcagcccgtgcgccatgcactgcgctttgatagccgcatgcagcttcagcagcggatcgaatgccgttttgcgctctttatcgcataccagctccacgccggcgaacaaaccgcgaccgcgcgtatcaccgacatacggtaatccgccgagcacatcatgcagcgcctgctgcaaatacgcgccctgctgctgcacctgctcgagcaaacgatctcgctcgataacctgctgcacggccagcgcagccgctgcggctgtcgggtggcagatgtaggtgtgaccatgctggaacattccgctaccggcttgcagcgcggcgacgatttgctcactggccagcactgcgccaatgggctgataacccccgcctaaaccttttgcgatggtcacgatgtcagggacaacgccatcctgttcaaaggcgtgcaacgtgccggtacggcccatgccgcacatcacctcatcggcgatatacagaatgccgtatttatcacacagccgacgaacgccttgcagataacccggcgtaggcggcattgcgccggtggttgcgccaaccaccgtttcggcgataaaaccgataattttttccggcccggcgtccagaattgccgcttcgagttcgccaagtaagcgctcggtatattgctgctggctttcacccgcctcacggtcacggtactcattacaggccgacacgcgcaccacatccatcagcagcggcgcgaactggcggcggcgccactcgttaccgccaacggccagggcacccagcgtattgccgtggtagctttgtttacgggcaataaacagcgtgcgatccggctgcccgatctccacaaaatactggcgcgccagcttcagcgccgtttcaaccgcttccgatccaccggagacgaaataggcatagttcagagaaccgggcgcggtgcggacaagctgctctgccagttgttccaccgtatcgctggtgaaaaaactggtgtgggcgtaggccaaccgatcgatctgccggtgcatcgccgccagcacatccggatgggcgtgacccagacaagaaaccgccgccccgccgcaggcgtccagatagcgttgaccactggcatcggtgatgtaagcgccctgggcactgactgccactgccggggtggtacggaggctgcggtgaatgatttgactcatgcttttatcctgcttaagaaatcgctttcgcgtaagttgaaagcatcttgcaggatccatttgaatctcgtcaattcaataatgattcaaatgtatttaattttcttatgataaaagcaaatgaatcatttatcaggatttatcgggcatcacatacgccccggagcgttgcagataacgttctgcgctctcaattttattcaccgcctccctaccgtggcgggcaaccagcatcgccagcaaacactcggcgacgcccataccggacactatcgaagggaaaaaagaggggctgctgagggagaaaagcaacgtgcagtccgccgcttgcgccagcggcgaaaccggagagtcggtgatggcgataatccgtgccctggcctgcctggcagcattgagaacgtcgagagattcgcgggaatagggagaaaagctggtcaatagcaggcagtcttccgcgttgatctcacgggtgaagacttcgatattactggccagcccgtcaatcagcgacacctggcgattgaacaatcgatagacataaaacaacgaccaggcgataggaaagctggcgcggaagccgcaaatatagacctgcttcgcttcatccagcaacgtaaccgcttgctgcatagcgtgttgattctctgcctgagtgaatgccagattggcctgatgcgcgaggaacacctcttcgtacagcgcgggctgcgtccctttggcgatcaatttttcagccttagatacatatgtatcatttcctaagccgagatcgtcgataaatgcgcttttcagctcccgccaaccgttatagcccagacgctgcgccaggcgtagcagcgtggcaggcttaacgccggcttccgcggcgaaggcgcgcattgattgcaccaccagttggttggcattttgcagggaaaattccgccgctcgctggagttctggcgacagcaggctgaattggctcacaatattttcacgaagattcatggcgtatcgttatcatccgtaagagtggctgcggcgaaaccgggccgcagaaagggatatatataaccataattcgccgtaattgcattatggcagagacggaggctcatctctgcgccacggagtatcgccccaggcgaatgatccgaagcctctttattcggcgcctgaaaccgcgggattcgcaggaacgaccctatacccaactctttgatggcattggcaaaaaacattgtcgccgctatcgcaaaagagaaattattcgctttatttataaattggcttgctaaataattagtcaggttttattacgcagtagaggaattaagatgcgtttcagtaccatgcccgacagtgaaattatttctgaactgtgccgaagaattaaagaaacgcgtatacagctgggcctgtcacagattgagctggccgaacgcgctcaggtcggcgcggcaaccattaaacgcgttgaattaggcgaatccgttaccctcagtacgctgattggtattttgcgcggtctcgatcggctgcatcagctggagtcgattttatttgactcgcacatgcgtacatttaaggcacagctcaatgccggaaccccttcccgtatccgtattcggaaaaaaacgcatcagccaaaagagaaattgcccgccgctgcccagaccaacgaggctgatgccacgattaacgaatggtacacctcatcggcttctaacagcgtggtgtggtcttttacgccgtccgacggagagaaaaaaagctaacaggcttcagatgattttaaagatcagggaagagaaaaccgcctgcggctcaggcaggcggtttttaggggactcaggattcacacaccgcgactttaatcgccagaccgccccgggcggtttcacggtacttggcgttcatatctttgcccgtctcaaacatcgtttcgataactttatccagggagactttcggatcgctggtacggtacatcgccatactggccgagtttatcgccttcactgccgcaatcgcgttacgctcgatgcacggcacctgcacctggccggccaccggatcgcaggtcaggccgaggttatgctccatgccgatctccgcggcgatgcacaccttctccggactgccacccagcagctcggccagtccggcagacgccatcgagcaggccacgcccacttcgccctggcaaccgacctctgccccggaaatggaggcattcatcttgtacagaatgcctattgcgcccgccgtcaggaaatagcgcatatagatttccggcgtcacctctttgataaaacgatcgtaataggccagtaccgcaggaacaatgccgcaggcgccgttggtcggcgcggttaccactcgcccgcccgacgcgttctcttcccccaccgccatggcgaacatattgacccaatccatcgcgctcagtggcgtaatcgactggctctgcggcgccagcacgcggtgcagcgcagaagcccggcgcggcactttcagcggccccggtaaaataccttccgtattcatcccccggttaatggcgtttctcatggtctcccagattttcgccatattttgctcaacgttctcccggccgtggcgggcgatctcgtttttcatcatcacggcggaaatcgacaggcagttgttctggcagtgcgccagcaggttgcgggcagaatagaacgggaacggaatatcaacctccgcctccaggttcttaccaaagttttcctccgtgacgataaaaccgccgccgatggaatagtaagtctggaagtggacgattttgccatcgcaaaacgccgtaatgctcatcccgttttcgtgcagcggcagaaactcattgtgaaagcgcatgcattccgccaccgggaactgtatctcgcgctggccttcttcaataaacagacgatgcatggtgttgacatcgcgaataatgcccggaatggcgtcgatatcaacggtatccggtagataccctgacagaccaagaataatggcgatatcggtatggtgacctttacccgtcaatgagagggaaccatacacatccaccaccagccgagtcactttatgcagcaggcctttttcctgcagggtatcaacaaactgttttcccgctttcatcggcccaacggtatgtgagctggacggcccgatgctgattttgaaaatatcgaaaacgctaatcatatggcacccacgcggttacatagcaaaacggatgcgccaccggtgacaggcggcgctgaaaacttagctgaacagagagaagaaaatagcggagatggcaatcagtcccatcaccaccacaaacgcgttgctgatgtggccgctgtacttgcgcatggccggtactttgttgatggcatacattggcatcaggaacaggatcatcgcgatgaccgggccgcccagcgtttcaatcatccccaggatgctggggttcagggtggcaacaatccaggtggtcaccagcatgaacagcgcggtgatcttgttcagtttgttgatttcgatcgatttcccttttccgcgcagtgacttaatcaccatgccgttgaagccttcacgcgcgccgaggtagtggccgaggaaggatttagtaatcgcaatcatcgcgatgatcggcgccatccaggcaatcaccggcgcgttaaagtggttcgccagatatgagaggatggagatgttctgcgctttcgcttccgccaggttttccggggagaggctcagtacgcagctgaacacaaagaacatcaccgtcagcaccatcatgatgtgggcgaagcccagaatacgggagcatttgcgctcggcgtcctggccatattcttcacgtttagccaccgcaaaagaggagataatcggcgaatggttgaaggagaaaaccatgaccgggatagccagccacagggtcatccacagaccatttcccgttgccgaagcgctgctcagcgacagcgtatccagtaccgcgccgttccattgcgggatcaaatacagcgccaatatcatcaacgcgaacacgaacggaaacaccagcacgctcatggccttaacaatcattttttcgccaaaacggacaatccccatcatgccgacaattaaaatcagcgacaaaatagcgcgcggcggagacaccagaccaagctggtgagtaataaagctatcgacggtgttggtaatagcaacgctataaaccagcagaatcggataaatagcgaagaaataaagcagcgtgataagcttacctgcaccggtgccgaaatgttcttccaccacttcggtaatatcttctcccggatttttgcccgacaggacaaaacgggttaaaccgcggtgggcaaaaaaggtcatcgggaaggcaagaatggccatgatgattaacggaattaaaccgccgaccccggcgttaattggcaggaaaagcacccctgcaccaattgcggtaccgtacaggcccagcatccacacggtatcactttttctccagccgctgctctcgcgagcaacgagggtattttgaacggtttccataatatggcctcagtaatatagagtagggtcaaattaatttgactctgattcaggtaataaaaacgctgtgtttgtttggctattttataaaatgcaactatgctgattcactaacagcgatcacataacctgatttatagtggcaccttttaacgcatcaaaattagtactgaaatcttattattttttaaagtatcatttttaatacgttattatttatatgggtgtgcttaacttgctggatatttatataattcacgtgcagagataacaaccactatttgtcatacgattaatgaaacgcaaaaaatcaggggcaagaaaataaacgccctccccctcaattttcgctaaaagcccttgtagtgctctttactcaggccataaaatgacggacaagaaaggcccgtggcgtagaacttgctttgggcaacagcctctacgaccctgcggattcgatggttaagatgttctttaacgtgctggcaacgtttgtcgaattcgaaggagacttgatacgtcttcgcacgcgcgaagacatggctattccccggggcaaggaaaactgcgggggaagcagtcgacgctgttagataaacagcagaaagagctttgcaggatgcacggaagcggtgaatgctctatcagcgatctggctgaattattctccgtctcccgccccacggtctatcggacgctttcccggggaaataatggaaaaccggatttaataaaaatcagcaaggagcgattatgtacaacaacaatgaagtcatcagttacctacaagccaacaagatttgattgagcccctattcgagcgcgcaggtgcctttgaagcgcaatgggtgtctgattctggcatagcaaatattatcacccggatgattagataatcatgattcaatcactaaagaaatttctactgtggcaactcaggtttttatcatcgttgtacggacctgtgatcctcacgattatttttgcgctgcttcaggggtatttttttcctgagagccctgtttggcctataggcgtatttgccatgattatgattgttgtttttacgcgttattgtaaatggtgacagggtgaatatcactgttatttaaatcatcactgataaggaaattatatgtctactcccgctcatttatgacttgaagatgaaaacggatcgccgattattggcagttgtttaatgtccctgcgtttaggttctatcgaattaaaatcattttcgcatggtgtaaccattccagtagaccccagttggggcaaacttactggaacgcgcgttcatagcccgatcacgatagtgaaagatgttgtgcctaatgacgaagtttctgacctccgtgcagcccatggatgctggcgctggccgacgcacaataagcgcctgaacccggcaaaagagagtgccagcctgctggcacttttaaccttaaactgggtcgataaccgtcacgcgggcacctttaaatagggcgcaatgctcgctaatttctcccgggtttccgtcagttcgcgctccggcgtagattgctcgatgatacccgcccccgcctgtatccagcagcgctggctatcctgaaacacggaacgcagtactaacgccgcatcgaagcgcgtatcttccagcagcaggattgcgcctgaatagagctcccgcggcgttttttcaatttgcatgatcgcgttgagggccgcttttttagggatacctgacgcggtaattgacggaaacagcacggtaaacgcatcccaggcatccttatcttccgcgagctggccgctgacgccagaccccagatgctggacgctgccgcgctggcgaaccgacatcaaatcctcgaccaccacgctgccgggctggcaaaccgcctccagttcggcaatggcttctttgaccgagaggatatgttcaagcacctctttaccgtcgtgcagcagctccctctcatttgcctgattatgcgccatatcgcccatgcgatcgcgggtgcccgccagcggttcagtgaccactttctttcccgtcaccgacatcaccagttccggactaaaacccagcgcctcgcgtccttgctggcgaaacataaacgtacgggtgggcgtgttggcctgtcgtccatatagcagcgtagcgggcatatcaatacgcgctggcagaggaatcgcgcgtgagacgatgactttaacgtaatcgccgcggcggatcgccgaaacggcgcgcgcaacctgctgtttatacgcttcaccgtccagggcggtatccacaaccattggcccgcatggtgtcgccgtatcgacctcttttacccactcgcacagacggcggcatccgtcggcggagtccgcgtaaacggtaacatttcctttctcaaaaataagttcttcacggggagcggttaacgttagcagcggccactcgccggcatcaaaggccattccccgcgcatgagccgcaaagttgaacccaacctggccatatacccggcatcctcttacccgcggatgcgtcataaaacgacgcgcgcagtcggtaatcgaatctaccgcccacttttgttctccggcatcatcaatgaatgtcgcctgggtgcagtcggcattaatctgcagttgcgcctggcatcctctacctatgtaccagcaaggttggcgctcatagacatagcactcttcatctccgaactgacgtaagacgccagaaatcatcggcagccattgctcctctggtaacgccaggtgtaaaaattcactgattttcatcccttacctctctgtgttattcccggatcaatcaattgagcttgtcatcagttcttctgccgaacgcagtcggatagaaacaatccacgccgccagcaacgtgaatacgccggcaaacaggaagcaggccgcatagccaaagcgctgcgcgacaacgccgccgactacgccggccagaatggcgatggcggcgtcagtacattgaaagagcgtaaaatcgacaccggcctgcaaaggcgaagaaagcgccatcagcgtggcgtaaagacagaccaacgcgcaggccagcgaaacagattgaacaacgatcaacccctggagaatcggcagcagtagaggacccggcgctatcagcagcgtcatcactaccgccagcagcgcgatgccctgcacgccataagccgcaaacagcgctctgccgggtgagaggtatttcatcagcaatccacccgccagcgttccggctatgcccgccgcaatattcccgccgctgaacagcgcgccgagcgctgacatgctcagaccatgatccaacagcagcggcgccagaagaggcagcacaaaccgcatgccggaattcagcatcaataccagcattaagcccagccgagcctgtcgccttctaagcgcataacccagtgccggaacatgcggaacagatgctgcgcgcgttggttcggcaatgcgccacaggggtacggataagaccaggatcagcgccgccatcatcagcatggccgcaggccagccgacggtcgccgacagcatcagaaacaccccaccgccgcacatcattcccagatagctgccgccgacctgcacgctgtttccccaaccgtaccctgcgcgggtcagctgatcgacgcaaaaaccgtcgctggcgatatcaatagtggaggcgaccgtacctgccaccataaacagcgcaaatagcgcgacgactagcgtttcgggcaatccgccttctcgccctgtcccgccaatcgcggcggcaatcgccaggatcgccgcgagcgcagcctgcccgcgcaggatcagcatgcgggaacggcgctgcgggctgccaggaggtagccgccagcgctcgacccacggtgcccaaataaacttcagcgcccagggcagcatgaacagggttgtcgccccggcaagcgcaagcgatccgccagcagcgcgcaccagcgcgggcaaggactgcatcgagagcgccgataccagactctgtgtcacatagatgccggcaatggcgaaaatcacccgcccggtggttaacgtcagcggtttcacattcgacggaacgtcactcatgcgccacctcctctgacgtggaacccccttcggcgcgccagacgcgggcggccatttgcgcgtgccacagcgcctggtaacgcccatgaagagagagcagctgcgcatgggtgccctgttcaaccactttgccctcctccatcaccaggatgtttccggccccgacgatggtagacaggcgatgggcgataataatcaccgtccggttgtgaaccaggttatcgatagctttctgtaccgccagctcgctatcgatatccagcgcggcggtcggctcatcaagaatgacgattggcgcatctttcaataaggccctggcaatggaaatccgctggcgctcgccgcccgatagctgtccgcccatctcgcccattggcgtcagccagccttgaggaaggcgggtaatgaattcaagacactgcgccgcgcgggcggcctcttccacttcctgctgggtcgcctgcgggcgcgcaatcaggatattcgccagcaatgtgtcatcaaacagccagacatcctggaaaacgacggaaatcaggctgttgagctgctccgccgtcaggcgacgaatatcgacgccgccgatagaaatccgcccttgctgcggatcggcatagcgcattaacagtttgctgaccgtggttttacctgcgccggaagcgcccaccagcgcgctcatactggccgccggaaaggtcaaagagaggtcattgagcgcgggatcgccgctgtcgtcatagcggtaatgaatattgtcaaagcggatatcgtaacattccggcatctccccgcgttcggcaacgggaagcggcgcgatcgccataaattgctcaatacgctgtaaggcgctggcaatcagttccaccaccgaggtgtagctgataaacatggccatcggttcagcaaaacgcataatcatcgcggcggcggcaatcagaaaggcgaggttcaatgtgcccgtgaccacccagataattccgcataacaccaccacctgtagtcccagctccacaacgccggcgatcagcatcgtcgcgcccgcgctctggcggtgagtgcgggtctgtaagttttccagagcattaaaatgatcccgcagcgcccggcttttatcggcatcgctaccgcaggcacgcaataccatcatcccctgcgcaaattcaacaatatccccgctcagccgctggtgcgcttcgcccagggtctgcatttgtcgacgcatcgccgggcggcgccagtaataaaacggcgccagcaaggggaagatcagcagcatcaccagccccagccgccagtcgatccacaatgtcgccagcgacgccgtcagcggcgtgacgatggtcagcagtaaaatattggctatcgcaatcacataatttaggttttcatccacggagcccagcaacaaggcgttcgtttcgcccgctctgccgcgctggagcctctccagcggcacgcggcgtaattgttcgcccaggcgcaggcgcagctcatgggtggcctgcgccagatgcccgcggtattcaaagcccagcccataccagcggagcgccagcgtcaccaacgccgcaatgctgaaggccaaagcccagtgaagaagccgcgatgcttcattccgtagcagcgcatcaacgatcggatagagacaggcgaaggcgatcccctgcatcaatgccgccagcagcagagcaaccagactgcgccgcagcgttcccgcctgactgcccacgctggagataagctggcgccagatcgcgcgccaggccagattatccgccgggttagtgtctttcattttgcaccgcctcttcctgcgttctacccggcgcccactgctgcgcctgctgatagcgttgccatagccgttgatacaggccaccctgcgccaacagctgcccgtggctcccgctttcccggagctgaccgtcggaaaacagcaatatcacatcggcctgagtcaccatggagagacgatgcgcgaccatgatgaccgtccggccgcgcatggccgccgcgagggctttgataagcgccgcttcaccttccggatcggcaaacgccgtcgcttcatcaagcaccagaatgggacgatcctgcaaaagcgcccgggcgatggtgatgcgctgccgctgcccgccggagagaaatacccctcgttccccgacccgcgtgctgtaaccctccggcaacgcgcttataaactcatgcgcctgcgccactctggccgccgctatcaccgattccagcggcgtatccggcgcgcccagacggatgttattggcgatcgtgtcggcaaaaagaaaattgtcctgaaacacaaacgagatttgcttcatcagggtctctatccgcatatcgcgcagatccacgccgccaatacgaatatggcctttgtcgggatcggcgtaacgcagcagcagccgcgccacggtgcttttcccggcgccgcttggccctaccagcgccacaatttgcccgacaggcacatgaaagctcacctcctgcaacgcggcgccactccgcgcttgcggataatgaaagcttacctgctcaaaggtgatactcgcctcttccggctgtcgatcggctcgcggccgcgagagttccggcatcgcgagaacctgatagatacgctgaacgcttaaacgcgtttgcgcgaccaggttattaagcatcatcatcggcattaccgcttcggccattccgctggctatcagtaaaacggctacccaggcgataaaatcgagactgccagcgtgcagcaggccgtatccgcaccagataagaacgaatatggtcggcagcgggttcagaattgagaatgaaaagcgcgctgaaaatccggcctgtcgataccagcttttgagcacatcgacccactcttcgagggcatgttgatagcgcaaaaagctggtactgccgctatcaaaggtcctcaccaccggcatggcctgtacgaactcaatcaccgcggcgctgacccgttcacgcgcctgatgataacgctgagccatgttttccgagcgctgacgggcgagtaccagcaccaccgaaccaaacgccagtacccccagcgtcgcgatggccagtcgccagtccagccagaatacgagaacaactgtcgccagcggcatgattatggcgcgggcatagagcggcgtgctgtcagcaacaaaaatatgtaacgacttcacatcatccagcattactttcgccaccgatccgctgcccatttgctgtaacgcgcccggcgcaagctgtagggtcttgcgggctaatctgctgcgcagaatattctccagatggaaagccgcataatgagaggtattgaacgcctgcaggcgcaggataaaggtcgctatcacgcagccgactacgccgctcagcggccagacggggatgatgtaaggcgccccgcgcagatcgcgcaggcaccatgccagaaaaagcagcgcccccaggctggtgaaggccgccagccccgccagcgccatagccaggagcaccttccggcgaaccggggtaatcacctgccaaagaggaaatcgggacagcgattcagtattggatgagtgagatgacatgggagtggctgattttcctgatgaatttttatggatgccaaaaacactatttcaaggtggcgttccgggaattaatgtgaataataaccattatcaattactcatctaccccattcggttctatttatacccgcattggtctaagccacagggagataacccggtcatgacggagtcaccacaaacgcaatctgcaatctctgttcaccagctagtggttggaaaacccgcgaacgacggcactattcctgcccagtgtgagctgctgcgctgctcgttgcaggaaggtatggatattttgctctggcggggccactttgctcagcccgagacgttgcagctgcacgacgacctgggcaggattaacttctcttgcattctggaaggcacatcgcgctttgcgatccagggactcagccgccacaccgactgggaactcgcgcgcgatcgtcattacattacccatacgccagactgccgcggcagcgcctcctactgcggccggttcgagagcattacgctctctttcagccctgaagccctcgcgctgtgggtgccggatattagctcggtcattaaaaataagatcgactcccactgctgttgccagcagcagcgttgtaatgccgaaactcacctaacggctcaggccctgcggcacgcgctgatgcggatgcacggcggcttcagtcatgaacaaaaaccgtcgacgttatggctacagggacaaagtctggtgatgctcagcctggtgctggatgaacatcgcgaggacgccagctgttcctcctgccacttcaatccgatggaacgccagaaactgctgcgggcaaaggatctgctgctggccgatttgacgcaggcgccgggggtcaccgaactcgccagagagtccggtttaagcgtgcttaaaattaagcggggatttcgcgttctgttcaacaacagcgtctatggtctttttcaggctgaacgcatgcaggaggcaagaagacggctggccaatggcaatacttccgttatgacggtggcggcggatctaggctatgccaacgccagccatttctccgccgcatttcagaagcagtttggcgtcaccccgtcgaccttcaaacgtctgatctaaccagggcttaccccagaaactcctccgttaacaaggcccggattcgccatccgggccttgttttttgccgaccgtaaaccgaaacgggcacaaataaacccgattcgggtagcgctcaattgttaataataattattctcatataagcaatgcttttggtatgacgtgccatcaggaggaagaatgatttctggcgccccctctcaggatccgctgttatcggacaacggcgaagcggccgattatcaacaattacgcgaactgttaatacaggaactgaatgtagcgccgcagcagttacaggaagagagcaatctgatccaggcgggcctggactccataagattaatgagatggttacactggtttcgtaaaaagggctaccgcctcacccttcgcgagctgtatgccgcccccacgttggcagcatggcgccagctgatgcgcagccgttcgggtgaaaaaccggatgatgcaagctccccggcggaggcggcgtggccagtcatgagcgagggtacccccttcccgctgacgccggtacagcatgcctatctgacgggccgaatgcccggacagacgctgggcggcgtcggttgccatctgtatcaggagtttgccggccattatctgacggcgccaaagctggagcaggctatcacgatcttactgcaacgccacccgatgctgcatatcgcctttcgcgccgacgggcagcaggtctggctaccgcagccatactggaacggcgtcaccgttcatgatttacgccagaccgacgaggcaagccgccaggcctatctggaaacattgcgccagcgcctgagccaccgtcttttacgcgtggaaatgggcgaaacctttgatttccagttgacgctcttgccggacaattgccaccgcctccatgtcaatatcgacctgctgattatggatgcttccagctttacgctgtttttcgatgaacttaacgccctgctggccggagagtcgctgccgcccggcgacccccgctatgatttccgcgcttatctgctgcaccagcagaagatcaatcagccgctgctcgacaaagcgcgcgcgtactggctggcgaaagcatcaatgctgccacccgcgccggttttaccgctagcctgcgaacccgccacgctgcgtgaagtccgtaatacccgacgccgcatgattgtcccgacaacacgctggaacgcctttagccaacgggccggtgagaatggcgtgacgccgacaatggcgctggcgacctgttttgctgccgttctggggcgctggggcggcctgacgcggctgctgctcaatatcacgttatttgaccgccagccgctgcacccggcggttgacgaaatgcttgccgacttcaccaatattcttctgctggataccgcctgcgatggcgataccgtcagcaacctggcgcgtaaaaaccagctcacgtttactgaggactgggagcatcgccactggtccggcgtcgagctccttcgtgaactcaaacgccagcaaagccatccccacggcgccccggtggtatttaccagcaatctggggcgctccctgtacagcagccgccccgagtcgccgctgggcgaaccggaatggggcatctcgcagacgccgcaggtctggatagatcatctggcgttcgagcatcggggcgaggtctggctacaatgggatagcaatgacgcgttgttccctccggcgctggtcgagacgttgttcaacgcctactgccagctgattaaccaactctgcgatgatgaaagcgcctggaagaagccgttcgcggacaggatgccccaaagccagcgggagatacgtcaacgggttaacgcaaccgacgcacccgttcctcagggcttgctgcatgaaggcattttccgcatcgccctccggcaaccgcaggcgctggcggtaacggacgcgcattatcagtggaattatcgtgagctgaccgagaacgcacgccgctgcgctggcaggttaatcgcgtgcggggttcagcccggcgacaatgtcgctattacaatgtcgaaaggcgcggggcagctggttgcggtcctcgccgttctgctgtccggggcggtgtacgttccggtttcgctcgaccagcccgccgcgcggcgcgggaaaatctacgctgacgccaacgtccggctggtgctcacctgccagcacgacgccagcgcctggtcagacgatattccccacctgacctggcagcaggccattgaggcggagccgctagccgaccaggcggcgcacgcgccgacgcagccggcctacattatctatacctccgggtcgaccggcacgccgaaaggcgtggtcatttctcaccgtgcagcgctgaatacctgctgcgatatcaatagccgttaccaggtgggtcccggagacagagtgctggccctctccgccctgcattttgatttatcggtttacgacatttttggcgttctgagcgccggcggctcgctggttatcgttatggaaaatcaacggcgcgatccccgcgcatggtgcgaattgatccagcgtcatcaggttacgctctggaacagcgtcccggcgctgttcgatatgctgttgacctggtgtgaaggtttcgccgacgccgcgccggagaaactgcgggcggtcatgctttccggcgactggatcggcctcgatctcccagcccgctatcacgccttccgcccccagggacagtttatcgccatgggcggcgccaccgaggcgtctatctggtctaacgcctgtgaaattaaccgggtccccgaccactggcgcgccatcccttatggctttccgctggccaaccaacgttaccgggtggtggatgaactgggccgggactgcccggactgggtaccgggcgaattgtggattggcggtatcggggtcgcggaaggctactttaacgatcctgtacgcagcgagcagcagtttgtaacgcaatcgaacgcgcgctggtatcgcaccggcgatctcgggtgctactggccagacggtacgttagagttcctcggtcgtcgcgataagcaggtcaaagtcgggggatatcgcatcgagctgggtgaaatcgaaagcgcgctcagccagctggcgggagtgaaacagtcaaccgttgtggcgatcggcgaaaaagaaaagaccctggcggcctgggttgtgcctcagggttcggctttctgtgttacccatcatcgggacccggcgctgccccaggcgtggcgcgggcttgccggaacgctgccctgctgcgtctgccccccggaaatctccgccggccaggtcgctgattttcttcagcatcgcctgttaaaactgaaaccgggtcaaactcctggcgccgatcctcttcccctgatgaatgctctcgctatccagcctcgctggcgggccgtggtggaacgctggttagcctttctcgtgacccaacagcggctgcagcccgccgctgagggttatcaggtttgtgcgggggaagcgccggagaatgaccctccttctttcagcgggcatgacctcaccttaacgcagatccttcgcggcgctcgccacgaactgtcattactgaacgatgcgcggtggtcgccggaaagtctggctttcgaccatccggccagcgccctgtatatcgaggaactggcgacaatctgtcaacagctttcccggcgtttacagcgcccggtacgcctgctagaggtgggtgtccgcaccgcccgcgccgcagagtgcctgctaacccggctcagcgctgacgagattgagtatgtcgggcttgagcacagccaggagctgctgctgagcgcccgacagcggcttgcaccgtggtctgacgcccgtctggccctctggagtgcagacacgctgacggcgcatgctcattcggcggacattatctggctgaataacgccctgcatcgtctgctgccggaagagcccgggctcctcgcggcattacagcagctggccgttccaggcgcgctgctctacgtgttggagtttcgtcagttaacgccctccgccctgctcagcacgcttctgttaaccgatggtcagcccgaagccttacttcacaatagcgctgactggggggcgatatttaccgccgccgctttcaactgccagcacggcgatgaagtcgagggattgcagcgcttcctcgtacaatgccccgttagccaggtacgccgcgatcctcgtcagctgcagtccgctctcgccgaacgtctgccggggtggatggtaccgaaacggatcttcttacttgacgccttaccgctgacggcgaacggcaaaattgactatcagacgctaaagcgctgtcataccccggaagctgaaaaccggactgaagcggatttacccctgggcgatattgagaagcaggttgccgtcatctggcagccgctcttgtcgatgggcgccgtcagcagagaaaccgacttcttccagcatggcggtgatagcctgctagccaccaggctgatcggacagctccaccaggcgggttatgaagcacgattaagcgacctgtttaatcacccccggctggctgattttgccgccacgctgcgtaaaaccgacctccctgttgaacaaccctttgtccactcccctgaagaacgctaccggcctttcgcgctgactgatgtgcagcaggcttacctggtcgggcgtcagccgggctttgcccttggcggcgtaggctcacacttctttgttgaatttgaaattgccgatctggatattcaccggctggagaaggtctggaaccggttaatcgcccgccacgatatgctgcgcgccgtggtgcgggatggacaacagcgggttctcgaacagactcccccgtgggtgatacccgcgcacatcctgcacagccccgaagaggcgctgcaggtacgcgacagactggcgcatcaggttctcaaccctgaagtatggccggtattcgatctccaggtcgggttcgtcgacgggatgcccgcccgcctgtggctgtgtctggataacctgttgcttgacgggttgagcatgcagatcctgttgtcagagctggaacacggctatcgctatccgcagcagctgccgccgccgcttcccgttaccttcagggattatctgcagcaacccgcgctgcggacgcccaatcccgactctctggcatggtggcaaacgcagcttgatgatattcctccggcgcctgcgttaccgctacgctgcttgcctcaggacgttgagacgccgcgcttcgcacggctctatggggcaatggacagcgcgcgctggcgtcgcctgaaacagcgggcggctgacgctcatctcaccccgtcggccgtactgttatccgtgtggtcaacggttcttgctgcatggagcgcacagcccgatttcacgcttaaccttacgcttttcgacagacgaccgctgcacccgcaaatcaaccagatcctgggcgactttacttcgctgatgctgctgagctggcatcccggcgagagctggctgcaaagcgcgcggttattacagcagcgactaagcgagagcctcaaccaccgcgatgtgtcggcaatccgcgtgatgcggcaactggcgcggcggcaaaacgtaccggctgtcccaatgcccgtcgtctttaccagcgcgctgggctttgagcaggataacttccttgcccggcgcaatctgctcaaaccggtgtggggtatatcccagacgccgcaggtctggctcgatcaccaggtttatgaatccgaaggggaactgcgctttaactgggattttgtcgccgccctgtttcctgacgggcaggtggagcgccagtttgcacagtattgcgcgttgcttaaccgaatggcggaggatgacagcagctggcagctgccgctcgccgacctggttcccccgcttaaggtcacggagcgacgcgcccgccggctgcgccctgagcgcgctcagccgcggatcgcggcggacaagagcagcgtcagcctgatttgcgacacctttcgcgaggtggttggcgagcctgtcgcacccgcagagaacttttttgaggcgggcgccacgtcgctgaatctggtgcagctgcacgtcttgttacaacgtcacgaattcgccaccctgacgctgcttgacctgttcactcacccttctcctgtcgcgctggccaattatctcgccggcgtagccctgaaggagaaaaccaaacgcgtgcggccggttcgccgtcgtcagcggcgcatttgacgcgaaataaactgacttttcccggacgccatcgccaacgcatggcgcgccactgactttgtcaattttaggaaacgggaccgattatggataacttgcgcttctcttctgcgccaacagcagattccattgatgcatcgatcgctcaacgctacccggactgcgaacctgtcgcagtcatcggctacgcctgccattttcctgaagcgccggatggcgaaaccttctggcgaaatctgctggaaggccgcgaatgcagccgacgctttacgcgcgaagcgcttctggccgccgggctggataccgccattattgacgatccttgttacgtcaatattggaacggttttagacaacgctgactgcttcgatgccaccctgtttggctattcgcggcaggaagcggagtcgatagatccccagcagcgcctgtttttacaggcggtctggcatgcgctggagcatgcaggttacgccccgggcgccgtcccccataagaccggcgttttcgcctcttcgcggatgagcacctatcccggccgcgaagccctgaacgtgacagaggtcgcacaggtcaagggcctgcagtctctgatgggcaatgacaaggactatatagccacccgcgcggcctacaaactcaatctgcacggcccggcgttatcggtacagaccgcctgctccagttcgctggttgcggtccatctggcctgcgaaagcctgcacgcaggcgaatccgatatggcggtagccggcggagtggcgctttccttcccccagcaggcgggttaccgctaccagcccgggatgattttctctcccgatgggcactgtcgcccttttgacgcctcggcagagggcacctgggccggcaacggtctcggctgcgtggtgctgcgtcgcctgaaggacgcgctgctgtcaggcgatccaattatcgcggtgatcctctccagcgcggtcaacaacgacggaaacagaaaagtgggttataccgcgccgtcggtggcaggacagcaagcggtcatcgaagaggcgttaatgctggcggccatcgacgacaggcagatcggctacattgaaacccacggtaccggcacgccgctgggagacgcgattgaaatagaagccctgcgcaacgtctacgctccccgcccgccgcaacagcgctgcgcgctgggttccgtgaagagcaacgttggtcacctggataccgcggcgggcattgccggactgctgaaaaccgttctggcggtcagtcgcggaaaaattccgccaatgctgaattttcacacgccaaacccggcgcttaagctcgaggaaagcccctttaccgtgccggtgacggcgcaggagtggcaggacgaagtgcgctacgcgggcgtctcctccttcggtattggcggcaccaactgccatatgatcgtcgcttcgctgcccgacgaactcaacataagctaccccgccgcggatgacggcagcaagagttccgcgctgttgctcagcgccgccagcgacgccgcgttgcggcagctggcagcggactatgccgcggcgctgagggaaaacgcggatgccaacaatctggccttcacggcgttacgcgcgcgccgtctcgatcttcccttccgcctggcggcgccattaaatcatgacaccgccgccgcgctcagcgcctgggctggcgcgaaatcgacttcgcaggtctatagcggccacggcgccagcggcaaacaggtgtggctgtttaccgggcagggttcgcactggcgcactatgggtcagtctttgtaccagcactcaacggcgtttgccgatacgctggagcgctgttttgccgcctgtcgcgacatgctcacgccttcgctacgggaagcgatgtttaatcccgattcagcgcagcttgacaatatggcctgggcccagccggcgattgtcgcgttcgaaatcgcgatggcggcccactggcgcgctgaaggactgaaggccgacttcgccatgggtcactccgtcggcgaatttgccgctgccgttgtctgcggacactataccattgagcaggtcatgccgctggtgtgtcggcgcggcgcgctgatgcagctgtgcgcaagcggcgcgatggtggcggtatttgcgcaagaagaggcgctgatgccgttggcccgtcagttcgagctggatctcgccgccaacaatggcacccggcatacggtcttttccgggccggaagcccgtatcgcggagttttgcgccgcgctttcgcaacacgagatcgactatcgtcgcctgagcgtaaccggcgcggcgcactccgctttacttgaaccaatactcgatcgcttccaggaggcctgcgcgggtctgctcgccgagccggggcaaataccgctgatttccacgcttaccgccgaactcattgacgaggcgacgctcaaccaggcggattactggcgccgccatatgcgccagccggtacgttttattcagagtattcaggcggcgcgcaagctcggtgcccgcgtttttgttgaaatggggcccgacgcccagctgattgcctccggacagcgcgaataccgcgatgacgcttactggatagccagcgcccggcgtaaacaggaggcgagcgctgtcctgaatcaggcgcttctccagctatacgcggccggcgtcaccttaccgtgggccgatcttctggcaggcgatgggcaacgtatctccgcgccatgctatccgtttgcgaccgagcgttactggaaagaacgcgccacctccgcctgcgagcctgccgatgctgtgcttgccgctggattagcggtggccaacagcgccgcgacagcgctcgaactcccccgtctggaggcgcttaaacagtgcgccacgcgactgcacgccatctatgtcgatcggctggtacaacgctgtacgggcgatgcgatagataacggcgtggacgccatcaccattatgcgccatggacgactgatgccccgctaccagcagctgcttcagcgcctgctaaataactgcgtggtcgacggcgactaccgctgcgctgaggggcgctactaccgcgcccgccccattgaacatcagcagcgggaaattctgctgacggaactcgccgattattgtgaaggttatcaggctatccccgataccatcgcccgtgccggcgatcggttatacgacatgatgagcggcgcggaagagccggtggcgattatcttcccgcaaggcgcttccgacggcgtagaggtgctatatcaggaattcagctttggccgctatttcaaccagattgccgccggggtagtacagggtatcgtccaggcgcgtcagccccatcagccgctgcgcattcttgaagtcggcggcggaaccggcggcaccaccgcatggctgctgcctgaactcaaagacgtaccggcgctggagtaccacttcaccgatatctccgcactgttcacccgccgtgcgcagcagaaattcgccgactatgactttgtgcattacgacgagctggatctcgaacaagaggcgcagtctcagggctttgcggcgcagtcttacgatcttatcgtcgcggctaatgtgatccatgccacgcgccatatcggtcgaaccctcgataatttgcgtcccttgctcaagccgggcgggcgcctgctgatgcgcgaaatcacccagccaatgcgtctgtttgatttcgttttcggcccgctggtcctcccgctacaggatatcgatgcccgcgaaggcgagctcttcctcaccccccatcagtggcagcagcagtgccgccgcgccggattctgcaaaatagcgtggctaccgcaggacgacagcccgaccgccggtatgagcgaacatatcattctcgccaccctgcccggccaggagatgtccacgtcatcagaatccgcgctggaacagacgttgccggataaccctgattatctcgccgactggtccgattgcgcaggtcagccggaacggtttaccgcccgctggcaggaggcctggcggcgtctctccgcgcggcacggcgacgattcccccgtgaaaccgcccctcgttaccgccccgcaatggctgggggaggtgcgcttaagctggcgaaacgcagccttttcccgcggcgagatgcgcgtggaagcccgtcatccagacggcaagtggctgccgctggcgcccgacgcaccgcttcctgcgccgcagacgcattatcattggcgctggaggcccctcagcatcgacagtaatagccgcccgctggtattccgcctcagcgccggtacccttgcgctcgaagaggcgctggcgcaatacggcattcttcacgatccgcaggccccttctggcctgatgattgtcgacgagagcgcggagacgctggcgttagcgacgcaggtgaaagaggccctcaccgccagcccaggcggcttgattgtcgtcacccgccgcgcgtggcgaatcgaggaaaacgaggcgctatcagcggcccatcacgcgctgtgggctatgcttcgcgtcgcggccaacgaacagccggaacggttaatcgccgctatcgatatggctgaaaacgcctcgtgggaaacgctgcgtcaaggattaagcgctgtttcattgtcacaacgctggcttgcagcccgggataacggcttctggctcccttcgctggcgcccaatgcgggatgcgccgccgaattaccggcgaaggtgtttgccggcgataaccgctggcatctggtgaccggggcgtttggcggactgggccgccttgccgtgaactggctcagagaaaaaggggcgcgccgcatcgcgctactggcgccgcgcgtggatgcgtcatggccaggcgacacagcggacgtggagattcgcgtctgccgttgtgatgtgggtgatgccggagagctggctcgtgttcttgatgaactggtgaccagcggcggcattgccggagcgattcataccgctggcgtattggctgatgggcccttgcaggaactcgatgaccaccagctggccgccgttttcgcggtcaaagcgcaggcggcaagccagctattacaaacgctgggcaaccacgacgcccgttaatctgattctctattcgtccgctgccgccgccctcggcgcgccaggccagagcgcccatgcgctggcctccggttatcttgacggactcgcccggcagttctcctcccttgatacgccgaaagtgctctccatcgcctggggcgcatggggagaaagcggccgggcggctacgactgagatgctgacgacccttgccgatcgtggcatgggcgcgttaagcgatgccgaggggcgctggcaccttgaacaagcggtgatgcgcggcgccgcctggcgactggccatgcgcgttttcaccgacaaaatgcccccgctgcagcaggccctgtttaacgccgcagcaacagaacacgccgcgattccggccgcgactcccgctgataaccatgcttttcacggtagcatcagcgataaagcggcggtgatgacatggctgaaaaatcgcattgcggtgcagctaagactggacgattctgcttcgctgaacgcagatcaggatctgttacagctgggaatggactcgctgctctttcttgaactcagcagcgatattcaacatgacctgggtgtacgcatcaacgcggaacgggcgtggcaggatctctcgccgcacgggctcacacagcttatctgttctcaggcagagacggcgactgccgtatcgccgccggaagcgttgcagcacgatgccgctgagcgttacgcgcccttcccgttgacgccgattcagcatgcctactggttgggcagaacccatcttattggctatggcggcgttgcctgtcacgtgctgtttgagtgggataaacgccacgatgagttcgatctcgccgtactggagaaagcatggaaccagctcattgcccgccacgatatgctgcggatggtggtggatgcagatggacaacagcgcgttctggcgacaaccccgacgtatcgtatcccgcgcgacgatctgcgcgcgcttcccccgcaagagcagcgccaggcgctggaaaaacggcgccatgaactgagctatcgcgttttacctgccgaccggtggccgctctttgagctggtggtcagcgaaatcgacgattgccgctaccgcctgcacatgaacctcgatcttctgcagttcgatgtgcagagctttaaagtcatgatggatgatttggccctggtctggcgcggagaaaccctgccgccgctcgatatcaccttccgcgattacgtgatggctgaacaggcgcgccggcaaacaacagcatggcacgatgcctgggattactggcaggaaaaactgccgcaactgccttcagcgccggaactgccggtggtggagacaccgccggaaaccccgcacttcaccacgttcacttcgacgcttgacaggcaagagtggcaggcggcgaaacaacgctggcagcagcagggcctcaccccctccgccgcgctgctcacgctgtttgccgccacccttgagcgctggagccgtaccacggcatttacgctgaacctgacgttcttcaatcgccagccgatccacccgcaaatcaatcagttgatcggggattttacctccgtcacgctggttgattttaacttctcaacgccgctaacgctgcaggagcagatgcaacgaacccagcagcgcctctggcaaaacatggcgcacagcgaagtgaacggcgttgaggcgatccgcgagctggggcgccagcgcggatcccagcgtcaaccgctgatgccggtggtgtttaccagcatgctggggatgacgctggaaggaatggctatcgaccgggcaatgagtcatctgttcggcgaaccctgctatgtctttacgcaaacgccgcaggtctggctggatcatcaggtgatggagagcgatggcgcgttgacgtttagctggtactgcatggacaacgtgctggaaccgggcgcggctgaagcgatgtttaatgactactgcgccatcctgcaggccgccattgccacccctgaaggcctgaagaccatggacagcgggattgccgaacacattccccgccgccgctggccgctgaacgcgcagacagactacgatctgcgcgatattgagcaagcggcgcaggaataccccggcatccaacaggccagagcggaattaagcgaaaatggcgcgttaaccctggatatcgttatgaccgaggatccaccgccctcagcgccgttacatgatgagcacgatctcgcctcactggcgctgccgttgcctgaacagacgcaacttgacgagctggaagcgacctggcgctggctggaggcgcgtgcgctgcaggggattgccgccacgctacatcgccaccgtctgttcaccaccccggaggttgcccacccatttggcgaaatagtacaggcgctgagcgcgcaagcatcacaccggcgcctgctacgccagtggctgcagtgtctggcggaaagagaatggttagtgcgcgagggggatagctggcgctgccgcattccgctcagcgaaattcccgagcctcacgaagcttgcccgcaaacccactggagccaggcgctggcgcagtatcttgacgcctgcatcgcccggcacgacgacctcttctccgggcagtgttcgccgctggaactgctgttcaacgagtcgttgcgcgtaaccgacgcgctgtatcgcgaaaaccccgccagcgcttgtctgaatcgctataccgcgcagattgccgccctttgcggcgcagaacggatcctcgaggtcggcgccggaaccgcagccaccgcggaaccggtgctgaaggccacgcgaaacacgcggctgtcataccacttcacggatgtctccgcgcagttcctcaacgacgcccgaacccgtttccacgatgaatcgcgggtgtcttacgccttattcgatatcaaccagccgctggattttaccgcccaccccgaggcgggttacgacctgattattgccgtcaacgtgcttcacgacgccagccatgtcgtacagtcgttgcgccgattaaagcggttgctgaaagccggcggacgtctgctgatcgtggaagcgacggaacgaaacagcgtattccagctggcgagcgtcggctttatcgaagggttaagcggataccgcgatttccgccgccgggatgaaaaacctatgctcacccgttcggcatggcaggaagtgcttgtgcaggccggttttgccaacgaactggcctggccgccgcaggaatcgtcgccgctgcgccagcatctgctggtcgcacgttcgcctggggtgaatcgcccggataaagcagccgtgagccgctatctgcagcagcgttttggcgcgaccctgcccgcgttgcagatccggcagcgagaaacgttatttactccgctatcggccccgcctgacgcacagattgcgccagccgaatcgacaccgagctccgggggagatccggcgctggaaaaacaggtcgctgaactctggcaaacgctgctgtctcgccccgtggccagacatcacgactttttcgcgctgggcggcgatagcctgatggcgacaaggatggtcgcgcagttgaaccgcagagggattgccagcgccagccttcaggatctgttcacccattcaacgctcagcgacttctgcgcccatctgcaggcctgttcgtcggcagaggagaatcctgtgcccatttgccagggcggtggcgacgaaacgttgtttgttttccatgcttcagacggcgatatcagcgcctggctgccgctcgccagcgcgctgaatatgcccgtttttggcctgcaggcaaaatcgccgcagcgttttgccacgcttgatcggatgatcgatgagtatgtcgcgagtatccgccgccagcagccgcacggcccttatgttctggcgggttggtcgtatggcgcttttcttgcggcgggcaccgcgcagcgcctggatgccaaaggcgagcaggtacggctggcgttaatcgatcccgtgtgtcgacaggattttcgttgcgcaaaccggacggccctgctgcggctgttagccgaaggcgatacgccgctggcgctgccggaacatttcgatcggctgacgcccgaccgccagcttgccgattttatcgaccttgccagaacggccggaatgatggcgcaaaacctgacgctacaggcggcggaagcgtggatcgacaacatcgcgcatctgctgcgcttactgaccgagcatacgccggacgaaaccgttccgctcccctgtctcatcgtgcatgccgcgatgagacccgcgcgctggacgccagcggaaaccgaatggcaaacctggatagaccgcgccgacagctatgcgattaaagccagccattggcaaatcatgctggatcccccccacgttcagacctgtgcgcagcatatcaagcgctggctcggcgcaacctcaacgcaaccggagaacacgttatgatgccgtccgccgcccctaagcaacgcgtactgattgtgggcgctaaatttggcgaaatgtacctcaacgcctttatgcagccccaggaggggctggaactggttggtcttctgtcccagggaagcgcgcgatcgagagagctggcctgtgcgtttggaatcccgctgtatacctcgccggaacagatcgccgagatgccggatatcgcctgtatcgtcgtgcgctcaaccgtcgccggcgggagcggaacccagcttgcccggcactttttgacccgcggcgtgcatgtgattcaggaacatcccctccacccggatgacgtccgttctttacaagcgctggcacaggaacgaggccgctgctattgggtcaacacgttttatccgcacgcacgtgcgggtcgcgcctggctcggggatgcgcagcggttacgtcgcagcctggatcaggcgccgtcggttgctcacgctaccaccagccgacagttgctctactccacgctggatttgttgttgctggcgctagaggttgatgccgccagcgtggcgtgcgaagtggtcggtagctttagcgactttcactgtctgagacttttctggccggcgggagaagcctgtctgctacttcagcgctatctcgatcctgacgatcctgatatgcacagcctgataatgcaccgtttgctgctgggctggccggaaggtcatctttcgctggaggcaagctacggccccgtggtctggtcatccagcctgtttgtcgcagaacatcaggcgaatgttcgtagtctctaccgcaggccggagatcctgcgcgacccgccgggtcagacgcgcagcgcggctcccctgagctggcgtgattgctgtgaaaccgccggaccggagggggtcggcaggttgctacagcagctgcgctgccatctggcgggcggaaatctgcccgcggcctgccactcagctcatcagctggcggtgtcgtacctatggcagcagattttacgcgcgaccggcaatgccgagatccgacacctgaagccgccgcgtcacgaccggttaacggctttctaccgccacgatgaggagtcccggtgatgcaatttgccatgtgtataccgttatggcccgcccgcaacgccagtacggcgcatctggtgatgtgccccttcgcgggcggcagcagtagcgcgtttcgccgctggcgagaccaccccatggcggagatcgcgctttccctggtgacctggccggggcgcgatcgcctgcgccatctggcgccgctcagcagcattacgcaactggcgtcgctgctggcggacgaactggaagagagcgtatcgcctgacgccccgcttttacttgccggtcacagcatgggcgcgcaggtggcgtttgaaacctgccggcttctggaacaacgggggcttcgcccacaagggctgattatttccggctgccatgcccctcatctgcattcccggcgcaggctcagcgaccgcgatgatgccgactttatcgctgaactgatcgatatcggcggatgttcgcctgaactaaaggaaaacaaggagctactgtcgctatttcttcctcttctgcgcgctgatttttacgctactgagcactatcactacgactctctcgacgattttccgccgctgcgcacgcctgctctgctcgtgtgcggcagccgcgatcgggaagcctcctggccggagatggaggcctggcgtccgtggctgaaccatatcgcaggcgaggtggtgattgacggcgaccatttttatctgctgcaacaatccagggccttttttacgcagattattcaccattttccccacgtattttctgcgacgaccgctttgcaaaatcggtcctgcacttcagaaaggtgacgcatgcactcttcctttgattctctgataaaacagtatcccttccccattgctgaacagctgcgccactgggcggctcgctatccctcgcgaactgctgtcgttgatgccaaaggctcgctgacctacagcgcgctcgatcttcgggtcgatgagcttgctgcagggttatactcgctgggtttgcgtccgggagaacatgtgcttatccagctccccaacggcaacgcatttgtgatcctgctgttcgcgctgttaagactgggcgttatccctgttctggcgatgccctcgcagcgggcgctggatattgacgcgctgatcgcgctggcgcaaccggccgcttatgtgattcacggagaaagccacgcggacctggcccgccagatggcgcgcaaacacgcctgcctgcggcaagttctggtcgcaggtgagaccgaaggcgacgattttacgccgctcttctcgctgcgcggcgaacggcaggcgtggccgcagcccgatgctgccggcaccgcgctgctgctgctctcaggcggcaccaccgggacgccaaagcttatcccgcgacggcacgctgactatagctataacttcagcgcctccgccgaactgtgcggccttaagccacagagtgtgtatctcgccgtcctccccgtggcgcataactttccgctggcctgccccggtattctgggaacccttgcctgcggcggaaaggtggtattgaccgacagcgccagctgcgatgaggtgatgcctttaatcgctgaacaaggcgtgacccacgtcgccctggtaccggcgctggcgcagctctgggtgcaggccagagagtgggaagacagcgatctctcttcgctacgcgtcattcaggtgggcggcgcccggcttgacccaacgcttgctgagcaggttatctcgacgtttgattgtcccctgcaacaggtattcggtatggcggaaggcctgctctgctttacccggttggacgatcctctggccaccgttctccacagccaggggcgccctatgtctcccctggatgaaattcacgtcgttgacgaagaggagaacgacgttgcgcccggcgaaacgggacagttattaacgcgcggtccttatactattacgggctattatcgcgctcccgagcacaatgcgcgggcctttaccgcgcaaggattttaccgtacgggcgacaatgtcaggctcgatgaggcgggaaatctgtacgttgaggggcgtataaaagagcagatcaaccgcgccggagagaaaatagccgctgcggaagtggaatcggtgctgatgcgtctggaagacgtaaaggattgcgccgtggtcgccgcgccggacacgctgcttggcgagcggatatgcgcgtttatcatcgcgcaacgcactccctctgactatcaacagctgcgtcaaaagctggtccgaatgggaatcagcgcgtggaagattcccgatcaaattgagtttctgacccactggccgctcaccgccgtcggcaaggtagataaaaagcgcctgacggcgctcgccattgagcgttatcgccattcagcccaataagcgccccgctacccgaaacaggtggaaataaacccgtttcgggtagcagtgcaattagaaatagttatcattttcaattcaccattatcggtattttggcgtctcgccgtttttcagggattcataacaatgaaaatgacacggttttatcctctggttctggggggatttttactcccggccgctgctcatagccaaacctcacagcaagacgaaagcacgttggtggtcaccgccagcaaacagtcttcccgctcggcatcagccaataatgtctcttctaccgttatcagcgcgacggagttaagcgacgcgggcgttaccgccagtgacaaactccccagagtgttgcctgggctgaatattgaaaatagcggcaacatgcttttttcaacgatctcgctacgcggcatctcttcggcccaggacttttataaccccgccgttaccctgtatgtcgatggcgtcccgcagctttcgaccaacaccatccaggcgctgaccgatgtgcaaagcgtggagctgctgcgaggaccgcagggcaccttatatggcaaaagcgcccagggcgggatcattaacatcgtcacccagcagccggacagcacgccgcgcggctatattgaaggcggcgtcagcagtcgtgacagttatcgaagcaaactcaacctgagcggcccgattcaggatggcctgttatacggcagcgtgacccttttacgccaggttgatgacggcgagatgattaacccctcgaccggtagcgatgatttaggcggtacccgcgccagtatcgggaatgtgaaactgcgtctggcgccggacgaccagccctgggaaatggggttttccgcctcgcgcgaatgcactcgcgctacacaggatgcctacgtggcatggaatgatctcaagagccgtacgctgtctctcggcgagggttcaccggacccgtacctacggcgctgtactgacagccagacgctaagcggtaaatacgctaccgatgactgggttttcaatctgatcggcgcctggcagcagcagaattattcccggaccttcccttccggctcgttgatcgtcaatatgccccagcgctggaaccaggatgtgcaggagctacgcgccgccaccctcggcgatacgcgtaccgtggatatggtatttgggttgtaccggcagaacacccgcgaaaagctaaattccgcctacgatatgccgacgatgccctatttaagcagcaccggctataccaccgctgaaacccttgccgcctacagcgatctgacctggcatttaaccgaacgttttgacatcggcggcggcgtgcgtttctcgcatgataaagccagcacgcagtatcacggcagcatgctgggaaacccatttggcgaccagggtaaaagcaatgacgaccgggtgctcggacagctctccgcaggctatctgctgaccgacgactggcgggtatatacccgcgtcgcccagggatataaaccttccggatacaatatcgtgcctaccgcaggtcttgatgccaaaccgttcaacgcggaaaaatccatcaattatgaaattggcacccgttacgaaaccgccgatgtcacgctgcaagccgccaccttttatacccacaccaaagatatgcagctctactctggcccggtcggaatgcagaccttaagcaatgcggggagagccgacgccaccggcgttgagctggaagcgaaatggcggtttgcccccggctggtcatgggatatcaatggcaacatgatccgttccgaattcaccaacgacagcgagctgtaccacggcaaccgggtgccgttcgtaccgcgttacggcgcgggaagcagcgtgaatggcgtgattgatacgcgctatggcgcactgatgccccggctggcggttaatctggtggggccgcactatttcgatggcgacaaccagctgcggcaaggcgcctacgccaccctggacagcagcattggctggcaggcgacggaacggatgaatatttccgtctatgtcgataacctgttcgaccgtcgttaccgtacctatggatatatgaacggcagcagcgccgtcgcgcaggttaatatgggccgcaccgtcggtatcaatacgcgaattgatttcttctgatccaacgatccagggatgcaataatcgcatccctgtcatcaccgaatttaactcgttgacgtccggaaaacgcctgggacaaccccagccagcaacaaaacctatattgtcactggccggccttgaagataattccatcggcctgctgctgccgaaggaattcagcgcttacttcgccggaataatcagcacctggcccggatagattttatcgggatgcgtcagcatcggtttgttggcttcaaaaatacgttgatactcattggcggagccatacatcgctttagagatggcgctcagggtgtcgccggatttcaccgtataataacgactttccgccccgctttgcgccaccttcacgctgtcattaacctgaccaacgccggtgacgttacctaccgccaccagaattttttccttatcttcttgcgaaccgacatcgccggtaaccgtcgcggtgccgtcgtccgcaacatcaatattgaccttttcggcaccaggcagattaagaccatcaatatgttttttcagcttgtcggccttatcttccttgctgccgccggagacggcgtcccatattttctcgcccgcttctttgacaaaatttaataatcccatcgttccatacctccattactgtttcacgatcaaatattcatcagaccggttaagcccatttccaggatgtcggttctgctaccccagagcggcaaccgcctgaagcagcacaacctgccatcaaagtataatcaataagcgtcaacgtgcaggatatttgcccggatacggcaggaaaatcggtactctgcccagtgggcatggcataaaatcaggcgttaacccgcagtgatggcgaaacggctcaggtcgggacaatcagctgcaggcctggatagcgctgcagccagcgtttttccgcgacgcgctggcggaaaatagccagcttatgctgcgcaaataccggcgtgggccgcagacggagtgcaaacagatcgtccagcccgtagggcgcaataacctcaataagccctgaacgtcccattctgaccgcgatagccgtcgccgtttcaggccagtacagcaacgcattctccgtggagtgataaggtttattaccgttacgttgatgcattctggcctgattcttcaccgaccagttaaaggcggatgattgctggctcagcctctcttccagcaccctatcgtcggcggcgctgccgcttttcgcgtcgaaccagacaacatccacatcacccgagactggcctttgcccgtagccgtgcagatgatcccagaccgcatccctgacaaagccggcgccaatccagccatcgctgagttccagcgcctgaacggcgtacagcgcgttcattcttaccgggtcgtttaacaataatctctgcaatgcgtcctgatagttcatgatttccctgaaacggcgatcggtccgctaagtgtatcagcgttcaggaggcgccgcttcaggcgccccctgttattggggtcagtttggatatcgaaaattattttacgttttaaccacttagatgtgagaaaaccgctctctgagcggattttcgtatcccgatgagcgatgctaatagctcctctcaaacgatcttaagaagatccttctgaatctttgatcgtgatagtgtaggttttgtcgaaatcgcctgattttgaaagcattccgccacctaagccgccatgtactcgtactttaactatacctgcttttgttggtatccctctaatctggatgcaattattgaattcatcatcatcacaatactgtaggtggagacctaaattatctggatgaatatctcctgcaatgacctgcttaccataaatatcataagaaagaactattccgccaaatatatttatttggttatagtagggagtaccaacaattgcatcattaagaatctccccttctggagtaaactctgcctgtaacgaacaggcggaaagtaaaagtaaagataaaacaaaaaatatcttccccatgtttattttaatggtttaaaaaccatccctccaaaaaatctcttgataaaaaattgcaaatcttttttaggttttatccaatttctttgttttccccaagaaaacaattccaaactaatatatccgttgggatcttgtgtgactgaaccattccagacgacccagtgtgtaggtaaaattgttttatttgtactatttacaagaagtccatcgtttattaatgtaacgactttatagcctcgctcaatatattgatttaaatctctgattccctggacacccgcctgagtgattcctacattactaaagactatttcataaccggccttttcaaaccattccgtcagtgtttgccacattgtgatgccagccactggcgaatcaagagcatcaaagctcagcatggtattctctgaatccctgagcccagctagtgtcatccagtcagtaccggctatctttggcctgccatcatcatagtaaaatgcacctgtagggtgacgacagccttcaccaggtgagatgattaagtcacctattttagttttcccgtaccgccaaagttcacgggcagcttgcgcatacacatcggggcgatccttttgcaaacagtaaaaaaatgcagcaggcccacatacacttgctgctatttgattagggaaatcaaatccgttaaatctttcatctatttgacgttctattaaatttttatcaaaagggtctctgggattgccaatggggtattcctttgcaataaatggacgttccgggatggtgattttaatctgctttgtttcgcccccctgactctcaggtttcattgtcccttttgactcaaaataacaggggttctcccgcttcaccggagaccaggctttgcccgacgcaaattcttccagcgtgtacatcttagtgaacggaacaggcgttacgcagtgcgtatgcaacatggtttttcggtaaagattcatttccataatataaattgtcgagagtgactcatttatatttccggtcatgtgactctgtgtttcataatttcccagaaacggctgttgcttcacatccacaaggggcgatttattcctgctggagtccatgcgataaatgcacaggtcatataacaaagcatcagccgggacattagagttaatacgggtactgagatagtaaacagccataattaatccattaatatatgcaggttaatattttcagcagattcagcataatgccatccggtaaccccgtgttcatcggtaacaccagcttcagaacgtccgtccgggaacatcagagtgtagcggcaaccagccattagctggccatcgtcaccggcgcactgaaagcgaatacagttccgggcaccggaatcctgtgcctgttgcgccgggacagaggactgactggtattgcgggaggtcagagagccggtgtctgtgctggtatactgcgtggctgaaccgtacacgtagtgatctgggcaacggcacagcactctgtcacctgtggccgcatacgctttgccttcttctgcccagtcctgcgcggaggccagaatttcaaaatacccgttacatttactgcatgatgccttgtcgccggtccgggctattgctttacttccttcaaaccaggacgcagtcgctgaaatgatttctccgtaactcgttttatcacccaaacaggccagtgctcttgccattattaatccctcaatatataagcggttatactcaccggcatcatacaacaatcacaacttaaccaaaatcttcggcttctggttgccggtacagtgcctgaatgcggcatatctgggaggggcagtaccctgtcgcatctgccgtttcacggatgctcagtttcttgacctgccggtagtacaggactttctgatgccgtcctgatcggcctgttttcaccggtatttacccagtgtatgcgcccgttcaataccctgcttttgtcgctggcggcggcccagccagtccttatgcgacatcgcggccatcaggtcgataagtatgtcattgatgtcggttatcacggcgcgggttattgggtcagcctgcgaaggctccttatctgacagagcctgctatgaggtgggcacatccaggctgacaatccgcagcacgtgttgctcgatctgctttttcagcctcatccagtacattaccagccgtatgcccctgcttcagtccagacttgaagaggtcaatgccatggctgcccttggtgagctgcccgatatggaaatatctgacaagggaggggtaaaagtctccccgctggataactgcgtcccggtgcaggtttcacagctgccagagctggtttacagcatgctaccgcaccctaaaatcacggaaattctcgatgaggtaaacagctggacgacgtttacccgacatttttcgcatataaaaaatgacattacccatcccgatacccgcctgctcctcaccaccatccttgcgaatggcgtcaatattggtctgaccaaaagccccggaagcaccaaatcatcactggaagatatccagccatggtacatccgcgacgaaacctattcagccgcccttgcagagctggtaaacgcgcatgggtaaagaccactggcggcattccggggagacgggacaacgtcatcatcagatggacagaatttcagaacaagcagctcaggcagctacgcagggcaggttaacccgaaatatgggcaggagcctggacgtcagttttatacccatatatcggatcaatacagcccgttttacacctgtataatcagtcgggtcagggattcaacccatgtgctagatggcttgctgtaccacgaaatgactccttattcacctcgcggctacgcttcgtacgcagcgtgatggaaatcaatttcccactgcagcacatcgccgtaaagcgccgatagcgcctgcttttcgctttcactcagcgccatggcgcagcggtcgagttcgttcttcagccagagcgcctgctgataaaattcgtcctccgcgtgcatttccacccagcggcgcacgtccgcatcgctctggtgatgttcgctcgcccgtcggcaccagaaataatacatccactccgcaccgaacatcagggtaacaatctgctcatagcttccctgccgggccgttcgcagcatgccgtcgcgaaagcgccgcacgccgggcagatcgtccggataatcagcgggagttatccgccgttctgataacacctgttcaaaccatgcaatctgcgtgtcaaccagggcattcaggacgccaataagccagcgctgctgatgaatacccggcgccttgctaaccccgagagcaaaaatcgcgattgccgtcgcgacaaagttgccctcaaacaccagatagcggttaaagacggctgtcggcagacgatcctgttcgatatcagtcacaaaacggtgctgctgcatcgcctgccacgccggttgatgttcgcgcagcaggcgttcgctaaacgcttccattatgcttcctccagcgcggcctgagcgaccgacataaaatgcttcacccgggccagctcaacatcgttccaccagacgccatcgaccttcatcgtactggccacaatgaccccctgggtccgcccgaggatctgactcacgttggcgggcgtcaccccggagcccaccagcagcggtagctccgtcgccgcgcggatctcgtcaatttcctccatcgttgcgctatcgcccgtgcgctggccggtcgcaattaccgcgtcggcctcgaagaaatccacgtcgcgcgtgagctcctgaatcgaacgatcggcaacgatggcgtggctaccgtgcttgacgtggctatcggcaaagacgcgaatatgttcagcgcgcagcatgctgcgatagcgcagcgccttagcggccgccccttcaataaatccttcgttggcgatataggcgttggcccactggtttacgcggacgaaatcggccccgcccgccagggcgatcgccatcgccgggatcgccgcgttcgccaggacattaatgcccagcggcacaccaaaacgctcgcgaactttctcggtaatcaccgccatcagcgcagaggtttcatgaccgatatcctcaggtttggaaaaaggaatatcaccatgattttcaataatcaggccgtgaacgccgccagaaatataattttcggcatcgcgaagtgcacgctcaacaataccggggactgatttgcctcgatatttcggcgtaccgggaaaaggatcgcaatgaataacaccaataacaactttattacgtgaaaaaatagcttgtattgcattcgttttttctgctgagatagcaaccatcttatccatcctgttaagggaacactatgcgtgtttacgttactggtaatattaccgtagatgaaacctggtccattccggatataccgaaaaaaggcgtgtccattcacggcattaaagtttcgcaggatatcggcggtaaaggcgcgaatcaggcgattatattatcccgctgcggaatcgacacgcgattaattgccgccacgggaaatgacagcaacggcgagtggatccgtcagcagataaaaaatgaaccactgacgctactacccgacgcccatttcaatcaacatagcgacacctcgattattttaaatagcgctgatggcgacaatgccatcattaccacgacggccgcagccgatacgttcagccttgatgatattattccgcatatggcggaggccgctgcgggcgatattctgctacagcagggcaatttctccctggataaaacccgggcgctgttccagtacgccaaagcccgcggtatgacaacggtattcaacccctcgcctgtcaatcctgacttttgccatctgtggccgctcatcgacatcgcggtggtcaatgaatccgaggccgagcagcttaagccttacggcgtgaaaaccttagtggtaacccagggcgcggcaggcgcctggctggttcaggcgggtcagcgccagttttgccccgctgtccccgccgaggcgctagacaccaccggcgctggcgacacgttcctcgcggtgatgctggcgtccgcgattctgcgcggcgtcgcgccggatgcgctggcgctggcgcacgccagccgcgctgccgccattaccgttagccgtcgggggacgctcagcgcgtttcccgacggccacgaactcaccgctctgttagccgtgaacggcgcgcgctgacctacttgaacagcgaacgataggtatcgacgttcgctttggttaccaccgtggccggaaccagaatggttttcggcacggttttacctgcagtgatagcgttcagcgcattcagggcttcggcccccatcttttccgggtcctgctgcagaacggcggtgacgtagccgccgtcaataccggaaatcgccttcgccgtcagatcccagccaaagactttaatatctttctggcgcccctggttttccacggcggcgatagcacccagcagagcgggttcgccagtggcatagatcgccgtcagatcggggttgccggtaatcaggttctccgccgcggtcattgctttatcctgtacgttctggccgtcgacgacgttagcgatggtaattttcggattgcttttcagcgtctcttcaaaccctttctgccgctggttctgaatggccgagttcagcgcgccgacaatacccagccgcgcctggccacccatctctttctgcacgtagtccacgaagtattgaccaataattctgccaccttcgatattatcaacgccgacctgagccgcctgcggcccggccggtaatacggcatcaatcgcaatcactggaatgttagcggcggccgcttcttttaccgcgggcataattccgttaacgtcgatagcggcaaccagaatgcctttaacgccttgctgaatatagttttctatcgcgtcgttttgcgccacgggattatcgttagagttaaaaataactaaatccttgccgctggctttggctgcatcctgcgcgcctttattcatcagattaaagaacagggcctgctgattgatttgtaccagcgcataagtcggaccggcggcgccggcggcagaaataaaactcatggatgccagcatcgtggtggcaacagcaagtaaacgcagttttccggtgtgaaataacatcatcagtatcctcgtcgggaatagttgatagccagcagagttccgcgccgcatgcgaacgcagaaggattattttttggcgggcaaatatcgtctatatggccagaacaatcatcgaccgttcggcggatacctgcttaatttcattccggcaaccggtccgtgtcggtgcgcgactggaatgagttaaacgggtttgggaatgacttcccggatgatgcggtaaactgcctatacaattctccgcagattaaattttgtcaagcatttatttccagttattgttagcagagaaattgctgtatccaccgcgcttaactatgttacagatagccgattctggcagaaatggcgcaggaaatgagtataaaacgcgtattgttatccgatgtggcaaagctggcggggctgtcgaaggcaaccctgtcgcgctatatgaacaacagtattgtgctaccgcaggacaccatcgatcgcatcgaaaccgccattcgcgaactggactatcgcggcaatagcctggcacgccgtcttagcaaaggcggcagcgaaacgctcggcctggtgctccccgatattaccaaccccttctttgccgaactggccgatgccgccgaagaggccgcttctgtcagcggttacagcctggtgctgtgtatcacccgcaacaacccggaaaaagagtgccagtttatccgctggctggatacctgccaggtcgacggcctgctgttcaccaccaaccgccccgataacggcctgctgcgcaaagaagtccagcgtcacgaacgcattgtcctgctggatgaagatattcccggcagtaaggtgccgaaagtgtttgccgataacgtccagggcgggcggatcgccaccgaaaaactgatcgccgccgggcatcgccatatcgctttcgtcggcggcccggacaagctgatgagcgtacgcgagcgctatcagggcttctgcaccgcgatggagcaggccggcctgagctggccgcccgaatgggtgatgtacggtgactaccagcgcgagtttggccagcaagcgctgcggaccctgttcagccagccggttcgcccgaccgccgtcttcgccgccagcgactatctggtgctcggcctgctcgacggtctgcgcgccagcgggctccaggcgccggaggcgctatcgttagtcggcttcgatgacgccaactatgccgattttacccagccgcggatttccactatccgccagcccgcccgggaactgggccgcaccgcggtgaacatcatgatgcgtctgctgaacgacgatcgggatatcccggcggaaacccgcctgccggtagagtggattggccgcgactcgatcaagatctgttaagcacgtcccaaaatggcgcaaaagcgcccacttttggcgcaaaaaacgatcaattaacattttattcactataatcagtaaaccggtttaccggagcgtaatgaataaactctatttattacataaggttaaatcacagggctgctgtgttgttcctgccctggcacggatgctgcaatgtttttactggcgaacaaatatcttacatagcgtttgtcctgactgtgctggcgagtgctctattccgcaggtaaaccggtttactagcatgtaaaccgtgtcggatagcatctctcccgcaggatggcgaacattttcccggcaacagcgatgggagttatcagatgcagcagccacaaactaccccgccaagggtggagatgatcaatatcaccaagacctacgggtcgatacgttcattgcgcggagtcaaccttgagctggctccgggcgaggtgctgggcttagtgggcgataacggcgcggggaaatcgaccctgaccaaagtgctctctggcgcggtgatcccctccagcggcacgattcgtatcgacggtgaacagcagcagtttactaatccggccgattcgcgccgctgccatatcgagatggtgtatcaggatctgtcgctctgcgacacggtcgacgtcgcgggcaatctgtttatgggccgcgagccgatgaaatcacgcctcggtatccccttcctcgatgaggcaagaatgcacgccgatgccagggagatgctaaaagggcttgggatctccattcccgatacccggctgctggtgcgaaatctctccggcggccagcgccaggccattgccatcgcccgcgcggcggcctttgacccgaaggtgctgattatggatgaacccaccgccgcgctggccgtcgcggaagtcgaagcggtgctggagcttattcgccgcgtttccgctcgcggggtgagcgtgattctgattacccaccgcctgcaggacctgttcctggtctgtgaccggatcatggtgatgtatgaaggtaccaacgtcgccgacagacgggtggccgacaccagcctgagcgatatcgttaacctgattgtgggcgaaaaattcaccgcccgctctgcggctgcacattgaggtaacaggatgagtatcatgaacttaagcagctcccgcatgatccagcattcgctgccgcgccgcctgctgcataaccactccggcgtggtcagcatcgcgctctttttcgtcttctgctgcgtggtgttttcgctgatcaccagcaactttctcaccggtaccaactggctcaacatcatccgtcagagcgccccgctgctgattgtcgcgacggcgatgaccctggtcattaccaccggcggtatcgatctgtcggtgggctccaccctcgcgctggtcggcgcgctttccgctatcgccctgaataactgggggctgccgtggccggtggtactgctcggcggcctgctgctcggcggattggtgggcgccattaacggcttctttatcgcctatgaaggcattccggcgtttatcgtcacgctcgccaccctggccgtggttcgcggcatcgcgctgctggtcacccagggctactcgattccggttccggctgacagcctgtttacttttataggacgcgcgtgggtagtcggtatccccatgcccgcgctgatcggcattatgattctggttatcgggcatattgttctcaatcatatgcgttttggccgctacgtgaccgctatcggcgctaacgccgaaggcgcgcgacgcagcggcattaataccaaagcggtcaccatgaaggtctatatcatcagcgggatggccgccgcgctggcggggatgatcattaccgcgcgcctcggcagcggctcctccaaccagggcgaaggctttgaactgcaggttattgctgccgttgtgcttggcagtaccagcctgtttggcggcttcggtaccattatcggtacgctgctgggcgcgctgtcgattgcggtcattcagaacgggctgatcctgtcgcatatttcgccgttttacacccagatagccaccggcaccattatcctgctggcgatctggctgaacacccgcattctcaaccccacgcgctccgcggcaaaaggatagctgatgaaaggatcaatttttcgccaccccaccccgctgccgcttggcgtcagcagcggttacgtgatgacggtgcttggcccgctgccgattagcgaaatgggggttactctgatgcatgagcatattctgctggatgcctccggcaaatgggtaccgccctgctgctgtagcgatcgccatcttgccgaaatgccggtgaaaatggaaaacctcggcgaactgtcgctgaatccgctgatgagccgcgataactgccagctgtttgacgtcgacgtcgcgattgaagagctgacgaaatatcgcgcccttggcggagaaacggtggtcgacccgaccaatatcggtatcggccgcgatcccaaagcgctggcgcgtatcgcccgtctgaccggtctgaacattattatgggcaccggcctctatctggaaccttcgcaccccgagtgggtacgaaccagcagcgtcgaacagctgaccgaacggctgatttacgatctgggcggcgcggaggagaaaccggaggtgctcgccgggctcatcggcgaaatcggtatctcgagccgctttacgccggatgaggagaaatcgctgcgcgctgcgggccgggccagcgccgcgaccggcgtgccgatcgaggtccatctgcccggctgggagcggctgggtcatcgggtgctggatattctcgaacaggaaggcgccgatttacgccataccgtcctgtgccatatgaatcccagctttgccgataagcgctaccagcgggagctggcgcagcgcggggcgtttctcgaatacgacatgatcggcatgagctattactacgccgacgagtcggcgcagtcgccctccgacgaggagaacgcccgcgcgattcgcgaactgattgacgacggctatatccagcaaatactgctgtcgcaggacgtcttcctgaaaaccatgctcacccgctacggcggccacggttacggctacatactcaagcattttgttccccgcctgcggcgccacggcgtcagcggcgaacagcttgaaaccttgatgattggaaatccccaacgggtttttggcggataaaaggaaagtcataatgcagaaaaaaatcttactggtcggtgaatcctggaccagcacctcaacgcacgttaaaggcttcgaccagtttgccaccgccacctggcacaccggcgcaacggattttctggccgcgttcgcggacagtgcctacgccattacctatatgcctgcccacgcggcggcgacagactttccgctgacgctggaagcgctgcagcagtgggatgcgattattctttcggatattggcgccaatacgctgctgctgcatccggacacctggctgaaaagccgccgaaccgccaaccgtctgacgctgctgcatgactacgtggccggcggcggctcgctgatgatgattggcggctattacagcttccaggggattaacggcggcgcgcgctatcgccataccgcggtggagaaagttctgccggtccgctgtctggcgtgggacgatcgcattgaaaccccggagggttgctatgccgaagtgacggaatcccacgccctgttcaacgatattccgggcgaatggccgtggctgctgggctataacgaagtagaaatgcatccggaaggcaaactgctggcgaccgtggccggtaccggtcatccgctgctggctattcgcgaatatcagcagggtcgctcgctggtgtggaccagcgatatgtcggcacactggctgccggaagagtttgctcaatggcccggctatcgccagctgtggattaactgccttgactggctgacggaacgtcgctgatggccgccccccttgagctcgcccggcagctgctgggctttaacaccatcaacccgccgggcagcgaagcagactgcatgcggttcttcgccgactggctcaacgatcgcggttttgcggtttcgctgtcgtcgttcggcgagggacgctgcaatcttatcgccaggctgcccggggcgaagaccggtaaaccgctggcctttaccggtcatctggataccgtgccgctgggaaatgccctgtggcagtacgatcctttcggctcgcagatagaagacgggcgtctttatggccgcgggtccagcgatatgaaagcggcgatagcggcgtttgccgtcgcctgcgttcatcagcgggaaacgatcctcgccggacgcggcgcggtattgctgattaccggcggagaagagaccggctgcgacggcgcacgggcgctgatcgcctccgcgacgttgccggacgtgggcgcgctgatcgtcggtgagcccaccgccaactatccggcgatcggccataaaggcgcgctctggctacgctgcgaaacgcggggaaaaaccgcccacggcgcgatgccggagctggggataaatgctatctatcttgcggcggatgcgctgggtaagattcagcatttttcccctggcgcggcgcacccgctgatgaagcagcccaccctcaacgtcggacgcatcgaaggcggactcaatattaattccgtgccggaccgcacgctttttgatgtcgatatccgcagcgcgcccaatttacagcacgccactatccggcagcgcttgaccacgctgcttggcgaaagcgtcacggtatccacgctggtcgacctgcccgccgtactgagccgggaggatcatgcgtggattaagcaggtttatcagcgctgccagccgctgcacgctaagccgattgaaccgcgcgtggtgccctactttaccgacgcctcgctgctgctgcctgcgttgggcgatccaccctgtattattctcggtcccggcgagccgtctatggcccatcagaccgacgagtactgcctgctcagccggctggaggaggctgagcagctatacggagacattatccgcgactggatggcgtagccgcccgcggcgaaggcaaagaatgagtgacagtgtcactttaaagcgcataccaggcgatcggcgtttgaataatatcgcggaataacagaggataaccgtctcgcgtcagaaacgcatcatcaccagcaaggaggcattaccatgtccgagaaaatccgcccggtgctcatttgcactctctctttacttctttccgcctgctcgggtagtgcttctgcgcctgatagcgccgaagacgcgaaagtatcggcagaagtggataagatgtttcgcgattatcaaacgggttcagatcaatcaccgcaggccaacgtctcacgctatctgacgcaggtccagagggctatcttcgcgaaaatagaccagccggcgtcctggcaggggcaaaaatgctcggtgcgcttaacgctacagcgtgacgggacggtgcataatccagcggtcgagagcggcgatccggcgttatgcgcggcggtaatgtccgcgctgaaagaagccaaaattccgcccgcgccagatgaaaaaacctatcagacattcagtcatgtggttctggacttcaggccctgagagctttttttgcatgttatcgcaggggctattcggcccctgcacgattttcagaactccacgcggccgccgaaattatagcgtcgcccttccagcatcgccttctgccggtaagcggtagtgtaaaccgggttcacatcaaacagattgtagataccgctcatcagcgtgacgtgcttactcaggcgataacgcacgcctagatctaccagcgcataggcatccgttgagctggacttgccgatatccggcgatctgctgcgccagctcgccttggtccacagttcaagatcggaagcggtgttccacgtcagcgaaacgttggccatactgctggggaaatcgcttagcgcataacccttatactcaccgcttttttgttcactgtgggtataggtatagttggcgttcgctttcagcgctgcggtcacctgccagtcgccgttcagctccagtccgtagatctccgcatccccgacgttaatgtattgcgacacgctatccgcggtatagccgttgtattggcattgccgggtagccgaggcggtacagatggtatggtcgctgattttgtctttaaatttggtatgaaaaagcgtggcgtcgagcgccagcgcatcctgctgccagtacacgcccagctcggtgttgatgctctgctccggtttgagatcgtcgttgccgataccaatctcagaatagggataagcgccgtagacgctggtaaagccggcgttgttctggcgcaggtccggttttttatagccggcggatacgccacctttcagcgcccagctttcgtcaatggtccagttgccgtagagcttaggcgtaacgtgatagccaaaatagctgtcatgatccaggcgcgcagaagtggtcaacgtgaagtccggtacaatcatccacgcgtcttcagcaaaaaccgcccagccgtgacgggtgattttactcaccggggtgaccccgggcgcctgcttgtccgcaataccaaaggtgtcattcagctcattgcgcgtgaagtttacgcctagcgtcagcttgtgatcggccagcgtaaaggtgtttgcgctattggcctcaaaattattctgcttgataaactgcgagtccatgccgggcacgcggtactccgtacgggccttttcgtagctgataaagttcttcacctccaccaggtcatcaccgtaccaggcatgctgtgacagcgagaccgcatcgcggtcaaagccccagtaccacgctttatcgttatgggttttctcctgattgcctttggaggcgttcagatcccagagctgggtatcggttggcgaaagagaaattgtggcgtccagattccccgcctgatgcttaacaaaacgttcctgggtcgggctgtcatcatcgcgacggtcaagatagtcagcccccacgctgacgccgagtttgcccggtacgacgggccccataaagaaggcgtttgtctggttagtattgccgtattcgcttttctcctgcaggaagtaattatcctccagcacccccgtccatttttcgaggttatacgcctttttggtgatgacgttgaccacaccgccgatagagtcagagccgtacagcgatgacataggcccgcgaatcacctccacccgctcaatggcggccagcggcggcataaaagcggcttcagacccaatgtgatgcccataaggtcgcgattcgcgggtagactgcttgataccgttcaccataaacgaggtataggtcgaatccataccgcgcatctgtacatcgccggtcgccaggctgccgtggccgttgcccaccagcacgcccggcatctcgcgcaacgcttccgtgacgttctgattggaacgggtattcagcgccttctcatcgagcaccgagatcgtcgccggcgcctcgcgcctctcctggctgaatcccgtggcggtcactaccatctgttcttcatttatccctgcgccatcagcggcgtaggctgccgcgggcagattgacgaaggcgagcgccatcgccacgtctatgcgtgtcttcatcgccacaaaaagtccttagaattgagtgagatcgatcttgagaacgtagtcaggccgatcgcttttttcgtcctgtttgacgctggcgtacagcgttccgccatccgcagaaaggaccaggctgttgggcatcgccgccgttttgagggtgtgcttgagacgatgggttcgcgcatcgatgacgctaatcgagcgatcgttgcgatgggtcacgtagatttcttcacgcttggcgttatagagcacagcgaccgagtttggcgaagcgatacgatcgaccagcttgccggagtccagccgcaccaccagcacatcgcgggtgttggtatcggcgatatatccgactccggcggcgctgttcagggcgatattgaggaaatagtgctcagcgtcagccggatcgaccttcacgcgggaaattaacgtcgacgttttgccgtccagggtagccaactccccgttgccggtgaccgcatagactttttcgcccgatgcatcaacggcaaaccctacggggtcgatgttcttcagcgtgtcaatcagctgctgcttgcgggtatcgaccacccagagcaggccctggcctttgcgcccgatccctgacacatacaaacgctggtttagtttatccagcaccacttcgcggacgtgggcctgtttcgcaggatctgaatcatcgctgagctgaatagtgttaatcaccttattggtcagcgtatccagaagcgttagcgagccatccagcgcgttacccaaatacaggatgtgattttcttcatccagggagagcgcgaaggcgcggcgttcggtaacgattttctcatcaatccgcagagaatccgccgccagtcgaaagaccagtcccgcggttttatctttatcaaacgagggcgcggaggcggcgtagagcgtcttctggccgttatcataggccagctcgtaaacgccgtggccgagagcctgagcgtggaattcccgctcggtgaaatccttagccgaggcggagggagcatgcagggaaaacgaaatgaccagcgcgaggcgcgcggcctgcttcagggatgcggtagacatgtaatttttctttacagtagcttacggaatgcaaacactaatgaaaataaatatcatttgcaattgcattcatctccatcttccctaccaatttttgtgttctgatattaaccgccgttttttgttcccgccgggagctctccacgcttcattcatcggaatcattaaaatcacgcgataatcggctgtaagatgctgactaactccgccagactccccgcctgcatcttttccatcaccctcgcccgatggacctccaccgtgcgtacggcaatgttcattatctccgcaatctcccgattcatcagccctttcaccaccagcagcgcaagctcccgctctttgggcgttagctgctgatagcagtccacgttcttttgccgcgcaaaccgctcgcctgaggccgccaggccgtgttccagcgccgtttgtagcggcttcaccgacaccggcttttgcagaaaatccaccgcgccgcgtttcatctgttctaccgccatcggtacgtcgccatgtccggtcagaaaaaccaccgccagggtgctgccgcgctgacgcagcgcctcatgtactgcctgaccgtccagcgccggcatccgcatatccagcaggacaacgccggtccggaagagatcggcctgcgcgaggaagacgcccccctctgcccagcacatcacctcgtagcccaggctttccagtaaaaaagcacatgcctgggtcaccgccaggtcgtcatccagtagatgaattatcgccattgccgctccgcgctccttgttgcatgaatgtcagtaccacggtgacaccgggtcgtccatcgggcgccgtttgatttgccaggcttatttccccctggacatagcggaccagccgctgacagataaccagcccaagccccatcccctcttgtcgactggtcacaaacggctggaatgcctgagcaagctgcgccccggcgataccaccgccgttatcctgcaggacgatcttcacgcctccggcatcgcgaacggcgtcaatccacagcatcttcgccccggcctgcgccgcattgaggatcagattcgccagcacctgttcaagcagaaccggcggtaagacgagcgttaacgggcgatcgacatcgctgttgagcaatagcccgggaaactgctgcggcattcgcagccactgccagacatggtcaatagcctgacgaacgctgatatgttcccaggtctccgctcgtcctggctccccgtgcgcctggctgacccaatggcgcagattgcgcagcgtttccgccccgcgctgagcctgttgatcgatgtggcccagcgcgggcagtaagggatgctgcggatcctgtttctgcaaacggatcgtacaaccctgcgcatagtggcggatggccgacagcggctgatttaactcgtgggcaaagcctgaggtcatctcacccaatacgctcatctgtcttgccgtttgcagcgccagctcctgctcgcgcagccggatagcgttgcgttcaagctgcctgccgcgccgccgcaccagcagcatcacccagatataattcagcgtcagcaacagcagcgccagcccgatgccgcccatgattaaccggtgctggataagccagcttttcatctccagccacagccgtcgctgctgagggtgctgttgaacttcgctcagcaacgcttccacctgacgggtcgaagcgggcgcgccccagtgaaagacggcgttatccggggcattgagcaagacgcgggtcacgcgatccgccagcgcgtcgctcaccgccggcagcgcggcaaacgaccagtcgggatacagcggggtactggttagacaaggtatcgccgccggccgctcgatgaccgcggtaaaatcggctttatttaccagtccctcatcagccattttttccagcaggcacaccggaacaatcgccgcctgcactgcccgttcacgcagcagatagatcaacgcatccgcggggaatccgctaaaacgcagatgcagatcgcgttccggccgcagcccggcatcgctcagcgccttgtatcccaataaatagccgccgaaggcctgaggatcgatggcccctaccgttttgccgatcaggtcggccggcgacgaaataccgctgtcgcgacgagtcaaaatgacgctgccgataacgttgcttgtcccgagtgaagagcgcaaagaggccagccagcgcagcgaagaatgactattcagctggacaaactgcgccggattggtcaccacaaactgcaccgagccgttattgaccgcctcctgcatctgctgcagatcgaggggctgaatgtgaaactgctgatccgttagctgctgattgagcatcacctccagcggctgccagtggctgcgggttaagacctcgccgcgcatggccagaacgccgatattccacgacgccgcccacccgctgctgttcagcaggagcgccgtcaccagcagcgccagacgctgcacctttttcgctctcacccgattatccctgttcattatgttgttttagatcaacaacccgccgggtatgtggttaaccacaatagagctgaccccgccgcgatttttacactgtaaatcatcaacattgtttattcatcacatgcaaaacaatggcgtgacaaatgtttcgttattgctgcgcgagggaaaaatatggacagcagtaaacgacagtttctggcgcagctgggcgttctcaccgccggcgcgtctctggtgccgctggcggaggcgaaatttcccttttcgccggcccgccgcgaaggcgcctcccgccaccgctatgccatgctggttgacctgcgacgctgcatcggctgccaggcctgcaccgtcagttgcgcaatcgaaaatcagacgccgcagggggcgtttcgtactcacgtcaatcagtatcaggtgcagttgggcgatcgggtcaccaacgtcctgctaccgcggctgtgcaaccattgtgataacccgccctgcgtgccggtctgcccggtgcaggccacctttcagcgccaggatggcattgtggtggtggataacacccgctgcgtcggctgcgcctactgcgtccaggcctgcccctatgacgcgcgttttatcaaccatgagacacagaccgccgataagtgcaccttctgcgttcatcgcctggaagccgggctgctccccgcctgcgtcgagtcctgcgtcggcggcgcgcggatcgtcggcgatatccaggaccgtcaaagccgtatctcgcagacgctcgccctgcaccatgacgccatcaaggtgctgaagccggaaaacggtaccgtcccccacgttttctatctcggactggacgaggcgtttgttaccccgctgacgggacatgcccaacccgcgctctggcaggaggtttgaatgagccaaaccatgatcattgaggaggtgctggcccgtccgcaggaggtgagctggctaccgtgggcggtgcagtatttctttttcatcggcattgccgcctgcgcggcgctgtttggctgcctgcttcactggcgcaaaagacacgatgcgaagctggaacggctgacgctgctgattgctctgacctgcgcaattaccgcgccgctggcgctgacggcggacctgcatcaagccgcccgcttctggcacttttacgcctatcccacgccctggtcgtggatgccctggggggcgctgtttctgccgctatttaccctctttctgggcctgtggtttgcggtacggcagtcaggtctgctgcgtaacaaaagtgacagcgtcacaaaatggctggcgctggccagcgcgcttaccgcgacggggctgctgctttacaccggacgcgaagtctccgtggttcaggcccgcccggtctggttcagctacgcctttgtgctggcgatgttctttagcgcgctgcaaacctttttcgccctgctgattgtcgcggtacgcaatgattttcaatgccaaaggcagttggcgatatggcagctctcagcgcttatgctgctggccgtcgtcgtggcgatctgggtcagcggtgataccctttccggctcggctattcgtcagtggctggtcatttcgccttcagcccgtcattacgcgatcggctggctggcatgctggcttatttcattgatcttttgcgcgcttgccctgcgttatccgctgacgctgcccgttcgcgccctgctggccgtcagcgccatggcgctgagctggctgatgcgctggacgctgctgattcaggggcaaaccatccccaaatttaatgcccagtttaatccctataccctgccggtcggtaccgacggctggctcgctatccttggcaccttcggcctgtggattgcgctgctcattattgtccgtgaaaccgtaaacggactcgcaaggagaaggcaacatggctaatttaacccgtcgtcagtggctcaaagtcggcctcgccgcaggcggtctggcgtctttcgccctgagctatcgcgaggtggcaaagcgcgccattgatggcctgctcagcggtacatccggtaaagtgacccgcgatcgtattttcgctaatgcgctgatcccggaagccaatgcaaataccggctggcaacaaaatcctcggcaggttatctcgatgacccaatgttttggctgctggacgcagtgcggcgttcgggtgcgggtggatagcgagaaagaccgggtactgcgcattgccggcaacccttatcacccgctttctcatgagcaccacctcgactcttccattcctttttcaaccgccatggcgcagctggcgggtgaaagcggacttgatgcccgctctaccgcctgcgcgcgcggcgccacgctgctcgagggactctatagcccgctgcggctccttgagccgatgaagcgcgcgggtaaacgcggcgaagggaaatggcagcgcatcagctttgaacaactggtgaaagaggtggttgaaggcggcgatctgtttggcgaggggcacgttgatggcctgcgcgccatttatgcgccgacaacgcccatcgatccaaagcatccgggattcggcccaaaaaccaaccagctactggtcaccaacaccagcgacgacgggcgtgatacctttttacgccgttttgcgctgaacagcttcggcagtaaaaacttcggcgcacatggttcctactgcgggctggcctatcgcgcgggctccggcgccttaatgggcgatctggataaaaatccgcacgtgaagcccgactgggataacgtcgagttcgccctgtttatgggaacgtcgcccgcccagtcaggcaacccctttaaacgccaggccaggcagctcgccagcgcccgcctgcgcaatgactttcagtatgtggtggtcgcgccggcgctgccgctcaccacggtgatggcagacgatcgcgggcactggctgccggtgatccccgggagcgattcggcgctggcaatggcgatgattcgctggattatcgaaaaccggcgctacaacgccgattacctggcgctaccgggcgcgcaggcaatgcggcaggccgccgaaaagagctggaccaatgcgacccacctggtcatcaccgatgaccagccggagctggccggacagcatttaacccttgctcacctgaatgcggagggcgccagcgaaccggtggtggttaacgaaagcggtgacgttgtcgccgccagcggctgcccgcgcggcgcgctctttgtaacacgccagctaaccctgccggacgggctcagcgtaacggtcaaaagcggcttccagctgctgaaagagtccgctgaaaagctcaccctggcacagtacagccagcagtgcggcgtcgcggaagataagatcgcggcgctggcggatgcctttacccgtcatggccgtaaagccgcggtcattactcacggcggcatgatggccggcaacggattttacagcgcctgggcggtcatgctgcttaatgcgctaatcggtaatctcagcctggaaggcggcgtgtttgtcggcggcggcaaattcaacggcgcgacagacggcccgcgttacaacctggagagctttgccggtaaagtgaagccgaaagggctcagcatcgcgcgcagcaaaaccgcgtatgaatcctccgaagagtatcgcagcaaggcggcggcgggcgtctccccctacccggccagagccccgtggtatccgttcgtcgccggacagctgaccgagctgctgacctcggcgctcgaaggctatccctatccgctgaaagcgtggatttccaatatgaccaacccgctgtacggcgtgcccgggctacgcgcggttgcggaagagaaactaaaggatccgcagcggctgccgctgtttatcgccattgacgcctttatgaatgaaaccaccgccctggccgactatatcgttccggatacgcataatttcgaaagctggggattcagcgcgccgtgggccggcgtcgccagtaaggccaccaccgcccgctggccgatcgtccctgccgccaccgcaaaaaccgctgacggtgagccagcgtcaatggaagcattttgcattgcggtggcgaagcgtcttaatctgccaggatttggcgaaaacgctattaccgatgctcagggtaaccactatccactccaccgggctgaggactattacctgcgcatggccgcgaacattgcgtttatgggtaacgcgccggttgccgaagccattagcgaggatctgacgctgaccggggtgcagcgtattctgccggttatcaaccagaccctgaaagcggacgaagtgagccgggtagcctttgtctactcccgcggcgggcgcttcgcgccggacacaagcggtcgagcggagaatcgcgtcggtcaattgtgggaaaaaccgctgcagatctggaacgcggaggttgccgcccaccgccacgccatcaccggcgagcgctacagcggctgcccggcatggtatccggccagattgtccgacggacgcgctatcgaagcgcttttcccgcgacagcagtggccgctgaagctgatctcgtttaaatccaataccatggccagcgcctcgacggtgatcccgcgcctgcatcatcttaagccgaccaatctggtggcgctgaatccgctggacggccagcgctacggcctggcgcacggcgaccgcgtacgaatttccacgcccggcggcgaggttgaagccgtcattagcctgttaagtggcgtaatgcccggcgtcatcgcgattgaacacggctacgggcatcgcgaaatgggcgcggcgcggcacaccctcgacggtgagcccatgccgttcgcggcgcagattaaagccggcattaaccttaacgatttgggatttgccgacccaacccgcgaggtcagcaatacctggctggactgggtctccggcgcggcggtgcgtcaggggctgccggcaaggattgagcgggtgtagaccgcttcgatacgtgcagggttgtgctccttagcgtaccggtattgaggcggccatgattagttataaaccaccatcatcatgccggttccgttgaaggcgccggttgaggttggcgtcccagattgccacgcatgccgttgctgagcgggatacaggtattgcctgtcaataggtaccctactcgctgccgtagtgaaccgtcagggtgatatcgcaggccagagaaaatcgcatacccctacagcaagaagtgttattttgcctgttccttgttattctgctgaattgttgtccaggtgattatcattcagcgtggtgatttttcagacgctgccctggcgcttgccgactcacactccagaccaaaaacgcggagagcggcaaccccattcacacctgccctgcaggtgttttttccacagggagattaagcgtgagatttgcatcagtacctttcaatcagaaccaggtgggctggccgctcaatgagattgatcgacaaatacagccgcagctatgcggcgacattaaagccgactgggtgattatcggctccggctatgccggcgtaagctttgcccgcaggctggccagcctcaatccgcagctgaacatcgtgctcatcgatgccgaatgcgccgcgaccagctcctcggcgcgaaattccggctttatcatcggcctgccgcacaatatcggcagctctaccgccgagctgaaaaaagcgcaggattaccgcgccctgctccaggaggggatccgcctgctcgatgaaacggtgaccgagcaccagattgcctgcgaatgggaaaacgtcgggaaataccactgccagatagatccgtccagcgaagccattatgcaggagtatgtggataacctgcagctgatgcaggagccttacagcctgctggacggcgaagcgctgtaccagaaactgggaacccgcctctacagcaaaggaatttacacccccggctgtattctggtgaacccggcgaaactgattgcgggcctcgcgcgtcatctgccggaaaacgtcacggtttaccatcaaaccccggcgctggctatgcgtcaggaaaacggcggcgtcagggtgacgacgctgcagggcacgatccgcgccgaccaggcgatgctggcgaccaacgcgctctcccgcgaactctcgcccaccgtgagccgccaggcgtcaatggcgacctacgccagcattaccgccccgctcacgcctgaacagcgccagcgtctgccggcaatggaaagctggggattaacgccggtcaacgcgatcgccggcgccacgctacgctatacccacgatcatcgttttctggtccgccagcatgtcgatccggcattgcggggagtgattaccgccggacagaccgccagcgccgcgcgccagcatctggcgctgttccatacggcctatccgcagctgcaggatgtgccgctggagcgaacctggtccgggaccatcagcgtcacccgcaacggcgcgccggtctgggggcgtcttgcgccgcagatctggaccgccgggggctgtaacggcgccggcgtatccaaacagactatcgccgggacgctgcttgccgatctggcgatgggccaggacaacccgctgatcgccgcgatgcagtcgctcggccaggcgaacgttatgccgccttcgccattcctcgatatcggggtggcgggcgcattatggaaagagcgttatgtggggcgcaaagagatgcccgcgtaatcgctgtctgacaggtttcactgcccgggcgtgaaacctgttgtttgggctactccgggatcgcttcatctttacgcagggtcaggacctcgaatccatccgcggtgacggcgacggtatgctcccactgcgcggacagttttttatcgcgggtgaccaccgtccagccatcttttttggttttaatccggctatcgccctggttcaccatcggttcaatggtaaacaccatcccctccttgagcacggcgccggtgccgggtatgccgtaatgcagcacctggggatcttcgtgcatctctctgccgacgccgtggccgcagtactccctgaccacgctgtagccgttaccttcgacataagtctggatcgcatggccgatatcgcccagcgtcgcgcccggcctgacgaccttgatccctttccacatcgcttcgtaggttttctgcaccagccgacgggccagcggtgaaacctcgccaatcagatacattttgctggaatcggcaatcagcccctctttttccagcgtaatatccacattcacaatcatgccggatttcagatgctcgctctcctttggcataccgtgacaaaccacttcgttgatcgacgtattcagcacgtaggggaaatcatactgccctttgctggccgggcgcgaatgcagatcgttgacgataaaatcctccacccggttgttgatggccatggtggagataccgggctgaataaaggtatccagcatgtcgaaaaccgaggccaacagctcacctgcgcggcgctgtctggccagctcgtccgcggtcttaatgggaattgatagcattgatcacctccagcaaccggtcagagccggacttgagcatcatcagcttaatttgctgatggttaagttcgggatagagctcgctcatcatacccagacggatccagtactccgcctgcgcgttgaccgaacgcgacatcgccttgctggcgtcacgaatatcgtcgtgcagcaggtcggaaatttttacaatgcccatttatacgtaccgtaacaatttatatatgtttcgtatattacgcctccccgctcaagcagacaacgtttgtcgtcagaaagcagaaaatggggttgcggtttttgtcgcccgcgctacggctggttaaggttcagagccactatctggatgttacgaggttcaacgacggtgcctttcgtcgtcacaaatgcattgtggacgacgtccccgctctctttatccaccagcgcaatatgcggttcatcatgcaggatatttttatgcccccacgccatcagggaaaacaggatcggcgccaggctgcggctttttggcgtaaggatatactcataacgttcgcgcacgccttcttcctgataaggcgttttgctcagtaaacccagttccgtcattttctttaaccggtttgccagcgtctgcttaggcatttttgtatgcgagcggatcgtttcaaagcgcgtcacgccgtagaaagcctctcttaaaatcaacaaaacccaccgatctcccaggatttccgctgccgcagaaagcccgcaaagctccggtaataggtaggcaactgaattattttttgacatgtccgctttcgctctttaatctgagtatgaattttagacctagcttaccaaggagaatacaatgcccttcgtcaatgtacaaaccattaaaggaataatgaacccggagcaaaaaaaagagcttttacgccgcatgaccgatctgattgtcgaaattgaagggaaaggcgatcccgagttccgccgttcagtctgggttcgcattgatgagcatgagccggaacagtggagtctgggcggcatacagcccacggctgaagcgatcgcggcaaaattttcgtctgctcaataatcctgcaaggtcaggagcctggcaccgtcgctggcggccgaacgttcacgtttacccataagcttcccgtccgctccaggccagagcggacgggaggcgtgaaggttaatcgactctgcataccacggtggcatgatcccaccatgcgttctcattaatattcacctcaagaaccgtaaattgctccgcccgaatctcgtccagcagggcctggagcggtcgcaacgtacgccatggtttgccctctttaagtaaatgatggcggataggatcgtacgcgagaatatcctcgggatgacgcggggttccgcacatggagccgatcaccagccgtcctccgggtttcagtaatcttctgacttcggcaaagcagaggtggcgggcatcatcaatcaggcaatgcacacagctgccatcaacaatgagctcaaacgtcgcatcctgacactgatgaatatggcagacatctccgacgaaaaaatttgccgggagacccgcttgctgaaaacgattttgtgcccatcggatcgcggtttcggaccaatctatcccccacaccgaatagcctcgttccgcaaaatactgcgcggccatcgcgccattcccgcaccccagctcaaggacaggcgcgccgggttgggggaaatagtgctgtaaatgaagccagctaaaaacgcgctcctgttgttctttggcccggaaataaccttcgccagcccaggcgatagcgccatttgccagcaactgccgatactctttttcatagcggttcataatcaagacgcctttgtcagcagcaacgctcgtcactttacgcgcggtagaggcaggagaaaaaccaaccgtcagacacgctccgtcatctcaggcagcaattgttcaatcacgtcgataatacttcttacccgcggtgggataaagcgggcgtcagggtagaccgcatagagaaagcgatcgggtaatcgccaggcgggtaataccggtaccagcctgccggactgcaaagcgtgggccgcaaggggtaactgcatgccgccgataccgatgccggactctagcgcctgcagcagcgcttcgctggtgttggcacggaagacggtattcactttcatatcaaccgttttatcacccgagaccagccgcagcggcgcgtcctgcgcgatgccgctgaaccgcacgtgcgggtgggcggccagctcgctgacggcatgcaccgttttaaaaccgggggcggcaaagagcgcggtttcaatacgcgccagcacgcgcgccgcactccccggctgcggttcactgctcaaccgcagcgcgacatccactctttcagcaaccagatcggcaatgcggtcatcaagggaaagggtcagacgcagctcggggtgcattttctgcagcgccagcagatgcggcaaaaagagctgcccgaggccgctcggcagctgcacgtgcacccggccttgccactggcgatcggttggctgtaagcgcctttccgcttcatgcatcgcttccagcaaaagctgcatatcgcgccggtaactttccccctgctcggtcagcgccatcgcacgcgtggttcggtgcagcaacaccaccccaagctcctcctcaagcgccgcgatctgctgactgacggcggattgtttcatcccgcactggcgggctgccgcggaaaaggatcccgcttctaccacgcgcaggaaggtggcaatggcgttgagcttattattcatttaatgattctgcttataagtgccatcagttttacgggatatgcgtgaaaaaaataatataccacactgcctctgtcacccaccctggagaagcaacgtgaataagataccgcaacccaaagtcgccctggtcgccggcgccagcggcattattggcagagagctggtgaaaacgctgttacgcaatcgctgggaggttatcggcctcagccgccatgcatcgtcccacccggaaaacattcccttcattcacgtcgatttactggatgcgcagcacagcgcgcaaaaactgcattcgctcaacggcgtcacccacattttttacagcgcatgggccaacgccgggaactgggcggaaatggttgaaccgaacgtcaccatgctgcgcaacctggtcagcaacatcgagcaaaccgcaccgctacggacggtaagcctgatgcagggatacaaagtgtacggcgcgcatcttggtccgttcaaaaccccggcgcgtgaaagcgatcccggcgtacccggggccgaatttaacgccgctcagctcacctggctcagccatttccagcgcggaaaaacgtggcgctggaacgcgatcaggccgggcgtggtcggcagcacggtgcccggcaacgccatgaatctcgcactcagcatcgcgatctatgcttcgctatgtaaagcgcaggatctaccgctgcgtttccccggttcggaaaaaacctggcacagcatcgtcgatcacactgacgccgggttgctggctgatgccacgctgtgggccgcaacctcgccaacggcgcaaaaccaggcgttcaacgtcaataacggcgacatctggcgctggtgcgagctgtggccgcgcatcgcgagctggtttgaactggcatccgccccgccggtcggactgtcatttcaccagctgtttgtggattaccgcgcgtactggcgcgaactggccgggcagagtctggtggaagcggacatcttaaggctcagcgacggtaaatttgctgatttcgtctttggctggaactacgacatgtttggcgatggcagcaaactgcgccgggcgggctacactgaaatgcaggccaccgacgacatgtttttccgcctgttcgcacagctgagagccgctcgcattatcccctgaaacagcatgctttaaccgtcagccggcgtcgcgcgagcaatccacgattcagtttttcgcctcttcctcgcgcgctctggtatccggggtaatgattattccaggacgtaaaaaagccgggttctcccggcatcatgatttaccaaccattttctgcgtataaataccaaacgtagtggatgatactactccaaatttcagcatccttatgcttctgatgatttcagagtacagaaaggtatccgcttcgatacgctggcaaaaatctgccaggcgctggagtgccagccaggcgatattctcgcctgggaggcggattaacgccctttctcgatcgtgcaggcccactgctggctcatgctgctctggctggtggcgatttgcagcgacaggctggcgtcaagggtatgcgtgacgctgtattcaagcaccacatcatccagatcgcgggcgacgcgctcaatgcgaaacagagcctggccgggttcaatattgagcaatcccgccgtgcggctatcgcagcacaccggcgtatagcgttccgtggcgttggccggcgagtagccgaacgtttcccgcagctgcttatacagcgatcggctgccgtccacgtggctcagatcgttatagatacggccattaagccaggtcagcacatggccaaccggccggtcgccctgcactaacagccgctccagacgcatcagctggcagcctaaatccagccccatttgctccgccacctggcggtcggccatggtcgaaatcagcgacagaacttccacggctatctcccccggcggagcaaaggtggtcagtacgtccgggaggtcggtgtagtatttctgcagcgcatcgcggttaataaacgtccctttaccctgttcgcggtacaccatgccaatactggccagcgaatctatcgcctgtttgatggtaccgcgcgcgaccttaaactccccggcgagcagcagttcgcccgggagtttatcgtcataggtaaaagagaggatccgctgcaggataacgtcttttatccttaaatagagagggagtccatccgactcaaacatacttgtgctccaactcagaggtagtgtatctggctcctgtaagcgctaagtatatcctgatttatctcctgattaccgtctatgtttgcgctggcgagaatgggcggcgtgcgcgcattttccagcatgatttcgcaaatacgtaataccaggctgttggcgatggtcgcgcccatgatggtggagagcggcgcggctttctgcgccatccccggcaggctcaccgccgcatcgccatactcgcagtggttatcaatggtgatatcggccacatccaccagcaacttgccgctggagtggcgcgacgtcacgcgcgccgccgtcgccaggctggtaatcgcgataaccgttgcgccgcacgctttcgccgccagcgcgacatcaatggtaatcgcgttgcgtcccgacaccgaatggatcagcagcgtatcttcagcccttagcggcgactgctccaccagtacccgaccgaagtgctccacattttccaccgcgctggtgagggttaacggcctgacgttaagcatcagcgcaggcgtaaaaagcggattgacgatggccaggccgcccgcgcgatagctcatctcctccgccagaatcccggcgtggctggcgccaaagacgaagatgttgcgctgccccataatgctgtgggacatgatttccgccgcccgggtgagttcatcggggcgctgctcaagaaaagccagcttctggcggatctgactgtagtactgtttcagggcctgactcatagacttcctcccgatatcagaacgccagcaggcgggtcaaaagatgaatgactggcgcgaggacaaacatatcgctgtcgcctgcccatagcgcggtatctgggatcgtattgtcgataaaaccggtgacgcagaaatactgcccccaggcgaccacggtcgaggtgataaaccccgccagcagagcgcctttatagcctccggtaatattgccgaagacccccgccgtaccggcgtgaaagaaaatcacaatcatgctgggaataaaaacgtagccggtatagcggccgatcagggtcagccacagcagcgagccgacaaaagcgccgacaaaccccagcaccaccgcgtttggcgcaaagttaaacagtatcgggcagtccagcgccggttttgcgccgggcaccagccgcgagccgatgccgttaaacgccggcaccatttcgccaataaacatccgtacgccgagcagcacgacggcaatgccgccggtaaacatcagcgattgtttgagggcatagatgtagaagctcaggtcgccggattgcgccaggatctccgccgctttcggcgtacctttaatctgcagaataaaggtgccaataaagaacagcagcgccatggtcaacgccgtcaccacgttggagtcgcgcaggaaacccagctttttagggactttgatatcttcggagctgattttgttgcgggcgaaaatctggccaaaaatcgcccccagcagcgcgacggaggcggaagtatgccccagcgccacgttgtcgttgccggtgattttccgcacccagggctgaaccagcgcgggctgtagggtccagtagagccccataatcaccgttagcatcagcgtcagctgcaccgctgaaatagcgggctcggtgttcaccatcaccccggcaaagatcatcgtcgtccagaacatcatatgtcctgtcaggtagatgtatttaaagcgcgtcagccgggccagcagcaaattgatggcgaatccgccggcaatggcgatggtcacgctgcttccgtagcgttcgctgaagcgcgcctggccgataatattggtcaggttcatggagctgagaccgaaaacttcggtccagatcggctgaaatatcagcagcgcggagacgataatcccggcccccgcgccgatgatcagaaagcccagaatgcctttcagggtgccggacacaatgtccgccagcgatttcttttgcagcactagccccagcagcacaatcaggccaattaagatcgacgcttcaccaaatatattgatggtgatccagcgcagcacgccaagaaactcgctcatgacggctctcctgcgggcagaattttcgcctgggtcagcgccgcggtgatttcggcgttatcgatatagttgttcaccaccaccaccggacaggacagatgcttaaggttgtccaccagctccgcgttggttatcaccacatcggcgttggccgaagcggcggaagagacatccatatgttccaccgaggcctgaatcccgtgctgttttaacaccgcctcaacgttcatttttaaaatcaggctggagcccatacctaaaccacagactgtcagaattttcatcgctattcactccgtgttcatcacgctacaaacgctgcgagccgctggctaacagccgataaagttgttctggatcgttcgaatgcatcagggtatgcaggttattttcatcgctgagtacggtcacgatatgctggataaggtggatatgggcatcgctgctggttgccgaaagccccagcaccacctgcaccgggtcgttttccgcatgaccaaacgccagcggttcacgcagcctgaccgcgctgatctgcgctttcatcgccccctgctccgggcgggcatgcggcagcgccagcccgggggcaatgacaaaataggggcccagctcgcggtagctatcgaccattgcctggacgtattgcgggctacaggctcccgcgcggcacagcgcgttccccgcctcgcgaatggcctcctcaggtgtagcggccgggcagtcaacgcgtatcgcctgacgctcaatcatcggaggctccttgggttaagtgatgacggatagaggcaagcgtggtcgccagcgcccgctggacgaacgcgcgccctttctcttcgctggcggcagttggatcgcccagcaccgcatagtcagaaaactcggtccagggtatcggctgatagcgaaaattgttcgggaaagtcggatagtgcgcgcgggcgttggtcatggtgacgaactccggcgccagcgccagcatcagcgaggtttcgacctcatcagcatgcatatagccggggtaagccaccgcggtggtttgccgtcgttttacctcctcctccatccccgcccagctatagctaagcaaggtaataccctgctcttttagctgccgggaggccgctttcatcgcatcaaaattgccgtaatgcgcgttaatcaccgccgtggtggtgataccgtagctggccatgttttccgccagcgacaccagcagcgacgtcagccgttcatgaccgatatcaatcgcgcccgcgtggccgcgcagggaccagacctggctgtaggaaacgaccggcaggctcagggcgcactcgcccagctgctcgtcaagcagcgcgcaaaaccgctcggccagcaggttatcggtatccagcggcaggtggtcgccgtgcggctcgacggcgccgagcggcaataaggcgatccgcgccttttgtaaagcccgccgggcctcgctttcgtttaaacgatgcagcttcataacatctcctcaggcaaaagcgaggtaacgcgccgggttgtcgacgaagaaatcatgcagcagcgcttcgccgtcaaacccggcttcccgggcctcgtcaatgaatcttggccgccagtcgctaaggataaatttcagccccagcccccctttgccgtaatgcgcgctcatggatttacgggcaaaatcgccgccgattaagatctgcttttgataaccgcgctggcagagcgccaggatggcctgggtacggatgtgctctgggtgatattttatgcggctgataccgtcgaaagagagaaacgccccggtgttggcgatctgacggtgcagccagggatcggggttacgatccatatgagcaaaacataagcgggagagatccagcccccattttttaaagagctgcgcctgctcgagtcccatcgtccccatttccgtatggctgtgcatcggcgccccggtgcgctgctgggcgcgaacgataacctccatggttttttgttccagaggggaaatggcgttatagccggtaccgcacttcaccacgccggcccgatgttcggtgccctctatcccctcagtgacctcgcgacagacatgttcaaccagttcatcaacctctgaatgtgcaatccattcggcgaaagtttgcgcggagcccggccgcttgctgctccacagaaagcctttgttaaaacccgcagtggcgataatgtgcagctgctggcgctgcgccatggcggcgacggctgcggcctgacggccataatccggcgcggtggcgtcgtagatggcgttaccacccgcccggcggaagtcgcttaattcacgctctgaagcctgcggatcgtcgagtaacagatcgtcatcctgacgctcggcccaatagggcggaatacagtagatatggtcgtggctgtaggtgacgcccagctgattagcggaaatatccccgtttaacgttcgaatgatgcccatgtttcttgctccccggaacggataagaaggtgctttcaacataggcgcgccccacttgaccagtcaagtgatcaagttcgcatccgtcatataaaatttctatctgtgagctcggtagatatttaaaacgcgataagagcgcactacgcgactgacttccaggaaacagaaattatatctgtaagaggatcgtgacggggacggtataaagcttttcatacttcagtgaaaattacggctgacgctggctgctataaagggaatggtaaaaatacctttcatgctcccgaacgttcccgtaataaaacactacctaaaggttatgccagtgacttcacggacaaacaggatgggactgaattattttccctttaaccatcggaagctttcgctggataaaattcaaaaacgggatttaatgaacacgatcaaggagcagtgatgttctacaggaatgaagtgatcagttatttacagacgaataaaattcttgcgttaaaactcgaccgtgccttaacgggcgtcgaaaaagcggtatcaaatcagattgaaagcataggcgcaggcgcgatgcgtatgctgtattatacctcctgctttactgatgagtatcaggatgtatgccagcaacaaaaaaacgaagaccttcgatttaaacaaggtgttatttatttgttgcgacatggtaatctcgtgtacgacttgctaaaaatatattttgaacaaatattcaaatttaaaaccaacgatcaattggaatacattaaaaaaaagcttatggcggttaatatccatattgccgccagttcactgacaagcgcgggatttgctttagcaacagcatcatttgtcgcagtaggcacaagactcagtcttgagttcagcgcactggcagggcaaaaagcaggtgggattgtaggcgctattgccatatacggcgttgtccagaaagcggttaatagtgcacatcgtcttcacatgacttatcctgcttactactcagcgctatacgcgaaagagctggaaatgatgtattttctgatagaacctttgtttgaacgcgccgaggcgtttaaagcacaatgggtatcggatgatgaaattgcagatatcatcaggaggatgatccaataattatgatggatttgattaaaagattgctcaggcgaatatttagatccctggtgtcgtattatggccccgccgcgctaacaatagtatttgctttaattcaaggtctatggtttccggagagtcctgcctggcttacccccgtttttttcttatttgtaatttttattttttaacgatacgtaacatggtaattccagaaaattattaccctcctgaatatataaggaaatagtatgtctacacccgcacatttatggcttgaggacgaaaatggttctccaattatgggtagctgtttaatgccgctacgaatgggatctatcgagttaaaatccttctcccacggtatcactattccggtagatcccagttggggaaaacttacgggtacccgcgttcaccgccctatcacgatagtaaaagaatttgatcagacaacaccgcttctgtatcgcgcagtctgcgaaggccgaaccatgaagacggcgacaatcaaaatgtatcgtattctcgaatcaggtattgaagccgaatatttcaatatcattctggaaaacgtcaagtttacaacggttgcaccgtacctctctccaaacggtataagtagtactcatcttgaaacgctcgaattgcgttatgaggcgatcacctggaagtatacggaaggaaatattatctatcgtgatagctggaacgatcgttgctgtgcgtgatgacaaagggtttcacaggaggtcaaggcttcctgtgagcctcacgaggacatcaaccgccggcgggaaatctggtggataatttagcaccaacaccgtggcaatgctctaccttagcgctccaaccgggggagaatgttcagcataaaagtgacgttgtcacatagtaatttttcaaagagaataccgctgctcatggaaaaatcgctttcaccaccaaggaggtgaataattttattttttataaacaacacgttacataagatctcagtacgtttaatctcagactaataatcaacatcattgattaaaatgtttaattgaatgaatcgataaagagagtattgttaaaaacaatgatgagcggagataaataaatgttacgtgattttttgaaggtagaaaaagaggatcgtctggtcgaacaacaggacgccagcagcggtaaagagaattcaacggacgtcaccgaatggattattgtgaataaaaatggtgataaaaaaggccgggtggcgttattcaatcaatttaccacccgccgttcctattgcgtgaattaccgcatcacccagtttgataatagcggcaaagtggttgtcgaccggctggcggaatcaatctgatcccagggaacgttgtcacgccggcgtcccgcgcctttagcccggcccgtcgctggcggcggccagcagcggcacaatcacatcgcttaacggcgtggggatatggtgaatacggccatatcgctgaacgaccccgttgcgaatatcccactccagcggcagcccggcctcgcgatccgtaagtattgaagtgcttaaatccggaggcgctcggtggaaaccggcgagaatttcctgcggcacggcgtcgtccaggctggcgcctacggcgcgagccaccgtcagcccctcctgcaaataggttaaagcaagcgccgtgatatcgtcgcgggcaaacatccctgcccgcctccccgccagcaccatcagaccggcgaccgcattctgcagcagtttacgccacgcaacggagagaaaatccgcgctgatatccacttcacagcgcgtgtcccgtagcgcgtgccgcacccgctcggccccctcaacatccggcagcgtcaggcgcggtttcgcccgcagccagaccgacgcttcaggttcacgctgggcggggaaccagacgaccgatggcagcacggtagcttccgccacgtacggcgcgaacagcgttttttgttcaacgccgttttggagcacgcagactaccgttcgatcgtgacacagcgcttgcagccacggtgcaatagccgcaatttgtgtcgcttttaccgccacaaataccaggtcgtacggcgcggcgaccgatgccggttccgtcaagaccggccccggcaccacaatatttccgccatcaaaacgcagcgacagctgcgggtgcgcgcggcggccgcataccagaggcgtacggccaacctcgtgcagcgccgcggcgatggtggtaccaattgcgcccggaccgatcagcgcaacggtaggttcttcaactgtcatctatgcctccaggccgcttccggcccctgagatttcattggtacgtaacataaacgcgacttcgttcgcattaccattttattcatatgggtaatctgaatgtgtgtgtcagcgtacacacttttcaccatcaacaaggaaggtacatgtttccagaatacagagagctgatttctcgattgaaaaccacgcacccgcgctttcagtcgctattcgaaaaacataatgcactcgatcacgacatttcgcgcatagaaggagtcgatggcaaaggatacagtctcgagcttgtacagatgaagaaagaaaaacttatgttgaaggacgaaatgctcaaaatcctccagcatgaaagcctgatgtaaacgataaggccaccggatggcggccttcttatagcaccaggctacgagcgaataaacgccagcagatcggcgttaatcacatcggcgtgcgaggtatgcataccgtgcggaaagccgggataaatttttagctggctgttcggcagcagcttatcctgcagtatcgcggcgttttgataaggcacaacctggtcgtcatcgccctgcatcaccagcaccggcagcgtaatggcttttaaatcttcggtctggtcagtttcagaaaacgccttaatcccctcatagtgcgcttttgcgctaccggtcatgccctgccgccaccagttctgaatcgtgccctgggacacctgcgcgccttcacggttaaagccgtagaacggcccggacgctacgtcgagataaaactgcgagcggttggcggccagcgctttgcgaaaaccatcaaacacctcgattggcgtaccgcccggattactctccgtttttaccatcaatggcggaaccgcgctgatcagcaccgctttggccacgcgcccctgcggctgaccatactgcgcaacgtagcgcgcaacctgcccaccgccggtggaatgcccgatatgcacggcgttatgcagatccagatgctccgccaccgcagaggcatcggcggcataatgatccatatcgtgaccgtcactcacctgatctgaacgaccatgaccgcgtcggtcaatcgcaatcacccggaacccttctgccaggaaaaacagcatctggttatcccaatcatcggcgcttaaaggccagccatgatgaaatacgatcggctgcgcctccttcgggccccagtctttaaagaagatattgacgccgtctttggttgtcacaaatgccatgttacaaactcctctcgtgagaaaacaaggctgcgggcctgacgcctgcagtgggtcgggtcttagggcgggatgctatgtccggacgatagcgtctcgttaggtgtgaaaatgacctggctggaaaagtgtagatgatttttgtcgatactgagcgttcgctttgtatccgataaatgggctgtaaacagcccatttaagcatgcagaaaggaaaatttaacgcagcacgaacttaataacgccggatggttaccgtttcggctcccgcctggtcgagcgcggcgagtccctcctctatccgcccgaggcttatcagcccgggggagtggcgaaaatcctcgcgaaaaatggccagattgccccacggcgcgtaataggcgatgtcgccgcgccgtggggtcattgaggcgccagagtccgcgtggcgcagtttcgtcggcagccaggcgattttttccgtggaaccataatcctcgagcttcaccgtcatcggcagctgcgccaggaactcattagccgctgcgctctcatccagcgagccgacaaccgtggcgccattgaactcaaactgaatcttcaccgcgttctcccgcccggcggcaaatgccgcccccgtcgtagcaataaaaatcaatagcgtggcgctaagagagttgaacatccgctcactctgccaggccacgagcgcgcaggacttcactcaccaccgctaccgctgaaaaggcatttggccagccggcatagaaagcggcatgcgcaacgatctcccccgcctcttgcgcggtgaggccgttatccatcgcccggttaaggtggtagccaatttgcgcgctttgcccggcggcaatcaacgcgctgaccgtgaccaggctgcggtcgcgcggcttcagccccggtcgctgccacaggtcaagaaacagcggttgagtcgtaaacttcaccagtccaggggaaatcgcgccgaagttctgttctacggttgttgaacgctgattttccaccgcctgattaagagggagcagctccggggaggcagcagccagctgctcgcggccaatgccgcgcgcgacaaaaatatctttcgtcaccgcaacggcggccatcgcgttgggccagccggaataaaaagccagatgcgtgatgatttctgagatttcagccgccgtgacgtcgttatccagagcaacctcaacgttatgttttagctccgccggctgattacgggcgataagaatcgccacggtcacgatgctgcggtcgcgacgcgagagttctgttctctgccagagatcccctatcagcacctcgctgccgaaacgggcaagcgccggcgcgacggattgaatatcctcagcggacaatacggatggactacgtggaaccattttttcacctcttttttcttctgccagggctggcgcgcccagcattaacgacattgcagctacggcaataaaagctttcatcctgaacacctttccgacacgttaattcttcagcctttccaccagttgacgctggtactcaggcagttgatcgcggctggcacgctgaaaaaccagcggaggcagccaggtcattcccgcatgcagcgcgctggccttcattggcgtaaagacgtcggccaggctgacgcccgttcgcccggtctcgccgtatgtcgcgtcaccgcctgcggccgtcgtgacaatcagcatctctttgccctgccatactcccggccctacgctgccccaggtatcgttcagccaggccttcatcatcggggtgatgttgaaccagtgggtcgggaagataaaaacgatgcgcgagtgttcccgcatgagccgtcgctcttcatcggcattgatatttcgggtatcaaaaccgtaaagcgcctcgagattgcgtacggtcacgccgggtacgctttgcgctgcggcctcaagacctttggtcatgaccgattgctcaggatacggatgagagacgataaccagcgtattagcctctgcggcacggctggtagaggtaaagctaaacagaaacgcggtgacggccaaaagccagaacagaccgggaatacagcggtgcgaatagttcatcaagctctccttctcttttgccacagggtaaggcgcggaataagaaggagccagccctcgctatcgaatggggctgtgagttattttcatcaatcgggctacagaccgagcggcttcatttcccgcacaagggagattaacaggcgcagcccggtgggaacctgatgacggctggagtaatagatatagaatcccggtccgtatgaggcccagtcggtcagcaccagacgcaggcgccctgcgctgacgtgctctgctatcagcggttccggcaggtacatcaggccaaacccctgcagaatggccaccacgcccgtctccgccagatcgaccgttaacagcggcggtactttgacggtgagctgctcttcgccacgttcaaactcccatttataaatgcggttgtttcccagacgattgctgacgcagcggtgctgttgaagatcgtgaggatgccggggctcgccaaaacgggcaagatattccggggatgcggcgaccacccagcgcacatcggcagacagccgctgcgccaccatatcttcaggcacggttccgccatagcggatccctgcgtcaaaccgcgcttccgttacatcaacaatgcggttgctggccacgatatccagctcaatatcggggtaacgttcagcaaaaacaggcaggaccggggccagcagcagcgtggccgcctcaacggcgacgttgagccgaatatgtcccgcaggcgagtcgcggtacggattgagctgttcaatcgcgacatcgattgaagcgagcggctcgcttaccgcgttgatcagactttcaccggccgccgtcagggaaacgcttttggtcgtgcggttcagcagacgcacgcccagccgcgcctcaaatcccttgatcgcgtggctcagcgtcgatgcgctcaccccaagttcaacggcagctttactaaaactctgatggcgggagatggcgaaaaaatagacaagatcggccatgtcggcacgggttacattcatacggtctcgctaactggatggaaattaagctgaaaaacaacgttaccttgatgtgatggcgtatcgtgacgttgatccgaccaggaaaatcaaagacctggatgcacgaacaatcttccgggcggtatgtttatactacaggcgtcagccttgataaactgaccttccgaccggagaaaacccattttatccgccagaggcgcatgtatgttacctgattgcgataaagccatcgtcctgctgcatgaaatctacggcatcaacgcgcatattcagcgaaccgccgcgacctggcgcagccgcggcttcgatgcgtacacgccagcgcttttccctcactctgcgccgttcgcctatgagcagcaggagcaggcctggcgccacttttccgataacgtcggatttgataccgccgccatcgtgtcgctgctggccgagctaagagcgaaatacggcacgctaatccttatcggctacagcgtgggcgccaccttagcctggctggccgccagaagcggactctgcgacggtgcggtttgccactacggttcacggatccgccagtactgcgatgcggcgcctccgtgcccaacgcaggtgattctcgcccgccatgaaccggcgttcgatccccgcgccctgcaaaacgagctggagaaatacccctccgtgacctgccggatgttcaatgcgcagcacggcttttgcgatgccgacagtccggcgtgggatgcgcgccttgcacagcaggcggacgaagacacgctgcggtttttaacgcttattcagtaaagacaggaggcctgatgcatcagatatttcgatggattaacgaacccgcgacatggtcagaagaggacggcgaactgcgcgtcgtcaccgatgcacaaaccgacttctggcgcgaaacctggtacgggtttgagcgtttttccgggcatatctacgccacggaagccgcgggggacttcacctttcaggtaagggtgcgagcagatttcagtacgctgtatgaccaggcagggatcatgttaatgcaggacgccaggcgctggattaaggccggtatcgagtacaacgacggcgcgcccgctatcggtagcgtactgacgcaggaaacatcagactgggcaaccggtattttcccgggcgaccccggtgagttctggctgcgtctgacccgccgcggagaggcgctgcgcctgcagtattcaacggacggtcaactgtggccgctgctgcggctgtgcccttttccgggcggcgcggcgaaggtcggcatcatgtgctgcacgccgcagcgcagcggcctgcgggttactttcgaccagatatcactgctgccgccgaatgataaagatttgcacgatctgagctgagcagccggctcgcgcgcgggcaaaatcgctgaagaatcgcgacggaggtatgatttctgactccccgggctgcccgtgctcgcgccttgctgctagattggcagcagcaaccttcaggcgaaaaatgaggaggagtcatgttttcctacatcatgctcggcactaacgatctgccgcgcgcgattcgtttttacgacccgttgatggagatgctggggcagccccggagcggccgcagcgagcaaggcgcatcgtgggggacattcagcggaaaccgcaccatcgggctgtgcgttggcaaaccgttcaaccagcagcaggcaacagcgggcaacggcgctatggtggccctgaacgcacgttcggttgagcatattcagcagctgcatcagctggcgctacgcctgggaggaagtgatgaaggcgccccaggacatcgcccgcagtacggtgaaggtttccacagcgcctacgtcagagatccggacggcaataagctggcgtttgtttattacgcaaacgcagactaaaccccacgccggaaagttaatgcagggttagcgcatggcgaaaccctgcgcaacaaccctggcaactctcaatatagcgacggatgctctcagccagatgattcgatttcggcaaatggccatgcaaatcgcggccttgtctgcatcagccttccgtaaacattcccgacctgaacgtctccctcatggcttcgatctcttgctggcgggccgcctttaaggcagacagcatattgcaggtaaaatccacaaagccaacgccgttggcggtcaccaggttaccgtcgcgtaccgaaggctcgtttctgtaccgcgcggcgccgctgtaggctgaccccgcccggctctgcaggtaggccagcccgttcgaggtgtggtcgacatcattgagaaagccatgcgcgccaaggaaggccgaagcgtcgcatatcgcgcctaccacgatctgccgggcctgcgcttgttctaccaaaggcacaacccgccgggcctcctctccccaccagttcattccgcccaccagcaccagcgcggcgtaatcatcgggtatcgtctcgaaggtataatccggcaggcagcgcaccccgccaattgacctcaccggccccttatcggcagccacggtcctgacttcgtatcgcggttcccatacgccaaacccgcggcgcagccccggtgccagcagcgcgaactcccagtcggcgtactcctggatgaggacaaacagcacttctttacgcgtatccatagacatcgcactctccttttattaacagaatttgccgtcgcagcatccgggataccgatggacactatcgccgtaccgccgccaaaaactgtataaattcacagtataaaaggcaaggctattttgctccttgcggcaacccgaatcgatttttgcgagtcagctccctggatagaaaactatccggggcaatggctatcgtctcccgcgcgctgagcccgcgtttaatgaaataggcctgcgcgccaggagaacctccctcgtgatgtacagcgtatatccctccggccgcagcctgggcgcccgcagttctttcagcgtaataccgacgatatctcccgattgaagacgttgacggatcgcgctaccgctcagccgcagcgctcgtctcaggaccgacagcaggctggtctgaaaggcgcgcgtgaccctgacatccaccctcacctgagaagcgcgaacaaggttgatgcgccagcgttcctgaaccacaaagtcaggcgtacccgatagcgccgcgcgattacgccgcagaacgaccggatcgtgagagtaagcctcgacggcagatttatcgttagcgataagtcgcgcgtagagctgcggattgattttgctgacgggcaaacgcgagaacaggctgatgttccaggtatacgcgcagcgcacgcacttatagatactccagacatcgagcacttttttttgcgagttgacccggaaggcaccggatggggtgaaatcctgctgcccatgacaggcggggcagcgcttgctaatcagctgatagccgactggcctgacgttccatgtaattttcatggtgaacctttttttaacccatacaaaagcggatccgtggaaaacggaccgtgatttttgcgatgtgaaaaatatttagagaatacttttcagtgggttaaaaaaagatttccaacgcgacgaccctgtctgaccgtgaatgaatgcgttcaagagtagcaaagcggcaagcgggctaaatatgcattaaatcaataaatacatagaaatcattcacaaacgacgttgtttaccttctgttcacaaaacgagaagcggctcactgatcaaacaaacctaaacgtttatgtttagcttcataaacgtttaggtcaaggaaatagccgtctgtatcgcgggtaatttcataaatacagagagcgaaatatgcgtaaagcaacgatgcgggatgtgagtgaagcgacgggattttctatgtttaccgtttcacgcgcgctaaacggtggcgatggcgttgctgacgacagccgggagctgattttaaaagtagcgcgagaactcggctacgtacctaaccgcgcggcccaggcgctacgccgctcaagcagggactcggtggcggtgattaccgcccatgcctcgaactcttactaccttaacctgatgtccggtattcagcagatgctgcagccgtcgcagtggaccgtagtgcttggcgatatcgcggtcaacggtacctacgaccgcgcgcaggaagatcgcatgattaaccgcctgatcgagtcgcgaatggccgggatcatttcgacggtgacgcttcagccggaaagcctgagcctgctggcgaaatgggatattccggtcgtcttcgttgactcacctccccgcggcgagcacaactttcccagcgtcacgaccgacaattatcaggccagcctgctggtggggaaccatctggcgcagcacggctataaaagctggctgctccttatctacccggaccgctggaccacgcgttttgaacgcgagcgcggtattcgcgagtccgcagagcgctgcggcgcaacgcttgaagttgtcgaaacggagaacgacgcgcagtcggctgcggacaccctgagccgatacctggaccgccagacatcgctgccggacgcgctcattgccggtaacaaccctattctgctgggttcacttaaacagcttcagcagcgccagatagccatccccgacgatatggcgcttatcgcctacgatgaattcgactgggcgccgctattaaatccgccgctaacggtgcttaatgaaaacagcgaagagattggcaggcagtcggctgaaatgcttatccagttaattaatccggaaggaaaaggagaaattaatacccagcgtaaagttcccgccgagctggttattcgccagtcctgcggctgtagaaaataaataaccattaaaaagaggcaattgagattgctgacaacgtatcgcccggacggcattgcccggcggcgcttcccctgcacgggccgacagaaatggcgcttgcggttttcgtcggccgggtaaggcgccacccgacaaaaaagcgggctacggcgtgctatacgcgctcatcattttagcgatgtaaataacggctgaatttcagtcgctaccgaaaaacaacatcaggggattatttctgaggcttccccacacctggccgtaccttataccacacgataatgaaaggagcagaatatgaccaaacttcgcaaagcatggctggctgtcgcggttagcgcggtaatcaccaccatgacagggtttattcccgcagccagcgccgcgccgcaggatggcaaaaaaatctcccgcatcggcttaatggtgcaggacatgtccaaccccttcttctcggcaatggaaaggaacgctaagcaggccgcggcgcaaatcggcgcaacccttaacgtacaggatgcgcaggtcgatctggcaaaccagaacacgcagattgacgcgtttattcagcagaaagtggatctcatcattatttccgccgtcgatgaatccgggatcgagccggccattcagcgggcaaaagccgccggaattatcgttatcgcggtcgatacgcccgcgaaaggcgcagacgcggcgatcatgaccaacgccatccaggccggggaaacctcctgcgaatacctgttcagccagatgggcggcaaaggcaaagtgctgctggtggatggcacgccgattcagaccattatcgaccgcatcaaaggctgtaaaaacgtcgcgcaaaaatacccggatatcaaaatcgtcggccagcaggcatcgcgcaacgaccgcgcttccggcctgatggtgaccaccgacatgctcacggccaatccggacgtcgccggtattttcggcatgaacgatccttccgcgctcggtgcggtactggccgttgaacaggcgggcaaagcgggcgcgatcaaagttaccggcgtcgacggtagcccggaagcggttgaagaacttaagcgcagcggttcgccgtttatcggtaccgcaacgcaaaatccgggcgaaatggtgcgccaggccatcacgcttgctcaggatatggtcgacggcaaaccgatcgcctctcataccgtcctgatccccagcgtactggtcacccgcgataacgtcgacagctatccgggctggtaatcacttcgtcactttaagaggcaaaaacgggatgacgctcaggttcatcccggagggcaaagacaatggccgatacaacatcacctcccttgctcaggctggaagggatttcaaaacgctacggcgcgaccctggcgctgaacaacgtacgctttgatttattcgccggagaggtccatgccctgatgggggaaaacggcgcgggcaaatccacgctgatgaagatcctctccggtaacgagcagcgcgatagcggcgttatttttatcgacgggcaggagattgatattcgcacgcccagggatgcccgcaaatatggcatcgccattatccaccaggagctgaatacggttcccgatatgacggtggcggaaaacctgtttctcggccaggaaccgaccgctttcgccggtattctcgatcgcaaacggatgcaccgggaggccagagagaagctggatcggattaacgcggacatcgacccgcaggcgccgctcggctcgttgagcatcggacgtcagcaaatggtcgagatcgcccgcgccgtcagtgaaaacgccaaagtgctggtgcttgatgagccgaccgccgccctgtcgcgggcggagactctccagctataccggctgatcgagcagatgcgtcaggatggcgtcgggatggtctatatctcgcaccgcatggaagaggtatggcagctggcaaaccgggtcacggtcttcagggacggcacgtggatcggcacggaaatcctcggcaacgtctcaaccaccgatatcgtccgcatgatggtcggccggcaaatcgtcgatctctatcagcacgagccgcgtacgcccggcaaggtactgctggaagtcagggatctggcaggcagtgcgaccggcccggtctcctttgaggtcaacgcgggcgaagtggtgagcatgtccggtctggtgggctccgggcgaaccgaagtcgctcgcctgctcttcggcgccgacccgcgcacccagggaagcgtgcgcattgacggccgggcgagcaatccggcagaccccaccgccgctatcgccgacggtatcgggatggtgaccgaagaccgcaaaactcagggactctttctcgggcattcggttgagcacaacattgatatcagctcgctggatagctttgtcgccggcggcgtggtgaaacgcaagtcgattcgcgccgccgtccttgagcagatgcgcaggctgcggctgcgggaaaatgcggttgaactgcccgtcagcgccctgtccggcggaaaccagcagaaagcggcgctggcgcgctggctgctgcgcgattcgaggctgcttattctcgatgaaccgacccgcggcgtggatatcggcgccaaaagggaaatctacgaactgatcgacaagctcgcccgcgcagggaaagccattctggtgatctcctccgatttaccggaggccatcggcattagcgaccgcgtgctggtcatgcgcggcgggcgaatcgttcatcagttaccctcgttttcagccacggaagaagaagtgatgctgcacgcaacaggaacctttaccagtcaatccggagaatgccatggacaacaataaacctgtgacggaattgccggtcaaagcgccgtttgattttgcgaaatggtgggatcgggtggggatcttaatcgttctgctggtgctgctgatcctgatgtccaccttcgcgccaaactttaaccgcgtcgataatctgctgaatatcgcccgctcgatttccgtcaacgctattctggcggcgggcatgaccttcgtcattttaaccagcggcattgatttatccgtcgggtcaatcgtcgccgtttccggcgtagtctcagtggtcgcggcgatggccgggctccctgcgccgctggcgattctggccggcgttggcgtgggcgcgctgtgcggtctgcttaacggcgtgctcaccgcctatctcgccctcgcgccctttatcgtcactctcggcacgatgaccttcctgcgcggtatggcctacaccattaccgaagggcagcctattgtgtcgagcagcctgagcttccgcgagctgggaaatggctatcttgccggtatccccgtgccggtcattattatgctgattgtttatctgctggcgtggttcattcttgagcgcacgcggttcggccgtcatatctatgccgtcggcggcaacgcccaggccgcgcgcctggctggcgtacgggtcaaacgcgtgctggcggcggtctacatgattgccggcgtctgcgcgggtctggcgggaattatcttcgccgccagggtgatttccgcccagcccacggcgggtacgggatatgagctggacgccattgcggcggtggtgctgggaggcaccagcctcgccggtggacgcgggcggattatcggcaccctgattgggtcgattattcttggcgtactcagcaccggcctgattctgctgagcgtgccctttttcacccagctattgattaaaggcatcgtcatcattcttgccgtggcgattgacgggctgaagcagcatccggagctgtttaccttctggcggaaaaaagagatcgcccgtacccgctagctttccctgacgctttgtttatccgccgcgctggcggcgggtcttcgcacgcttaaattttaatggagtataccctcatgacatatcacattacgctgacggacccgatgaacggtacccgggatcgcgaaccgattacgtttattctccctgaaaagctgcaggagccgctgtggtgggcgattaccgacgaggatgcgcggatcctttgccagcgccttgagcaggagtcgtcggcaagccgtaccgcttttatcgcgacggtcagcttcagcggtaccctcaagatgcggcttgaccgcccgctcacggcggctgaagccggtgaaatcgccggtatccaccggctgcctggccgggaaaaagactgttttgtccgtctcaataccggctgcttcgatctggaaatgtgtcggggaaccgcccagggcgtcggtgcatccaagtgggggctgcgccattttcgcgcgctgcaggacaacgtcgagctgcttccttccggaaataacgccattggcgggttttacggcccgttttttaccccggaaaatgggctgataaacccgccggagcataccctcgttgatattgagatcctcgaggaaggcccggtctatcatcactaccgcatgcgcggcgcgatccccgacggattattaccggagctgcgcggtaaacgtttctccatcgactggaaatttagctggaacacgccctggtttcagcggcgctactgcatagatgatttttcaacggtgattaacggccgttcggtgaccaacaagatcaccgtcggcgacgaatttgagagcggtccaggaaaactgctgttcgatcgcttcgcggcgtacggcggcacccgctatcgcgcgggcgacccctatgccgaagagctggtcgccatggtggccaataccgtcaccacctcggaaaaccagagcccgaaatttaccgaattccgcgaacagctcgccgatatggcctccgcccactgggatctctactggcggatgttctgccgctgggagaacgtgctcgatgaggcggagattcgcgaacggctgagccaggttcgcgcccgggcgcatcgcagagccgatctcaccgagcgggaatggctgctgaccgattcgcccgttgacgtttccgccgtcgcggatgaaaccatctttcccgggccggccagtaaaaccgtcgagtatgattcagcgagcggccgggcgatgatctggtggacctcccgcccctccggcgcgtttcagatagtccagcgccgccagtcaggatgggttaactggggcagcaacggcgaaaacgagtgtccggagctccccgtcggcgtcgatatcaagaccgcctgcggacgttttgccgaaaactggatgcaggtagccgatcggctggaaaccccgccggtggtcgcggtgagccggggagaaaagccatgatcctctgctgcggagaagccctcatcgatatgctgccctgtcggagccgcgagaatgcccccgcctttactccctgcgttggcggggcggcgttcaataccgccgtcgccctgggtcgccaggggatggcggtcgcgctgttttccggtttatcggacgattttatgggtgacatgctgcgccacacgcttgacgcctccggcgtggattattcgccctcaacccgcgcgccgctgcccaccaccctcgccttcgtcaggctggtaggcggtcaggcccgctataccttttacgatgagaatagcgccggtcgaatgctgactgaaaacgacctgccgacgctcggggatgacgtctccgccgttctgttcggctgcatcagcctgatcgccgaaccgtgcggcagcgtttatgaagcgctgatggtaagggaagcgccgcgtcgggtgatgttcctcgaccctaatattcgtgaaattttcatcccggaccggcagaaacacctggcgcgcatgaggcgcatgattgcattagcggatatcgtcaagctttccgatgaggacctcgcgtggtttgccgaacccggcgaagagcatgaggtgataggccgctggctgtcgctggggccgaagcttatcgtggtcacccgcggcgctgacggcgctgatgcctggaccgctgattttcatctgcatgtgcccgctattcgcgtagcggtggccgataccgtcggcgcgggcgatacggtgaatgccggtattctcgccagcctctcgcaggccgggctcctggagaaggagaaactagtgacactgtcacgcaagcaggttcgccaggcggtggatctggggatgcgcgccgccgcggtgacggtttccaggccgggcgctaacccgccctgggatcatgaactctgaagacagcggacgccctgtcagcaaccgacagccagatgagggtctgaaacagcgtttattgacggacccttatcctgatttatgttgtatatgatttgagtcccaattattgaatgaaagctaaaccagcttcatttattcatgggttattgccgactaatccattaatatcagctaattagatcgtcattcagtttctgtcgatcgcgttaacaggcatcagggacaggacgtcaataatgaaaaacaatccatggttcgtgcgtttgcgtaatacctctattccgcagcataagctgcgtccggcgaaatggctggtgctgattgccctgctgctgctgctggcgcagttgacgatagagtttttactcttagcataagcacaataaaatcggctgttggtgttcaaattcgcaagcgctgataagattaaactcaagtttaattcgtgataagcatctcagtttatcaacaacggctagacagaaagaacgcaggcatgctagtaattaattcaagcaagggaacggatttaaattaaacacgatttaaaccctacccgtcaggctgaaaaattaattgataatggtttggattgctgaacgattatcaaaagggtaagtgaatcgaaggccctcagagacgaaagtctctgagggccttttttgttttttttctatctcaggagtcaaaaaatgtctaaagaacgtcgtctctctcgcattttcgcaaaagatggtaaatcggtcacgctggcgctggatggctactatttttcaagcaaaacaaatggtattgataatacgataaatcagcttccggcccttgttgaaagcggcctggactgcgcgctggtcacttatggcatgttgaaaaatttccgcgaagttttcaattgcgttcccgttgtattacgcgtcgatagcacagtgaatatttttgataataccgttcccgatacgactcccgtcttttccattgaggatgcgctgaaagtggctgcggaaggcgtagtgtgcatgaccttccccggcgcgttcaatgaagagaaaacgcacatcatggcgatgcagctggcgcaggccgccgatcgctggaacgtgccgctgatcgtggaatccctgccgtacggctatcccgtgaccagcgacgactccaacaacccggccgttatcgccgcctcggcccgcatcgccgtagagctgggggctgacgtgatcaaaacccgctttaccggtaccgaagatgatcggcttatcgtcgaagcggccggcgtgccggtactcgcgctgggcggcccgaaaaccggcatcgacggttattttaaatttgtgcagcactgtatgcaggtgggtgcaaaaggcgtggcggtgggccgcaatattactcaggacccacagccggcaaaagtagtagcaggtctgaacgccatcatccatgaaaatgccacagcggaagatgcctacagcctctacatggctaaataacatcggatattaatatgttcttaaataacaccatcattccttccgtcagaaaatataaacattttgaacaggcgctggcctgcgcatcagaatacgtactgctatccgaagcaaatatcggcaacctgcaatcgctgattggcaaatgccatcagcgcggcaagaaagtgcttattcacctggagctactgggcggttttaaacccgaccaggcggggatcggtctgctcaaaaattactacaaggttgatggtgttatttcgtccaatctctcggccctacgctatgccaaaaaagagggattgttaactatcttccgggtattgctcatcgactcgcgttcgctggatcactccatcgatattgttaagcataacccgccagatgctattgaaatcttacctgctgaatatgcctgccagtgtctggaattgattagccggaatttaaaaggctttgacgtgatattcatcgccggaggctttgtaaagcggaaataccttgtagataaaattttccatgccggatttaaaggcattaccaccagcgaacccggtttatggtaacgcataaggagtccacgccaatgaaacaacactacgtcatgggcattgataacggcggcaccgtcacaaaagcggcgatttacgatcgcgccggcaacgtggtggccagcgcgtcgaagtcaacgcaaatgctgaccccgaaggaatttcacaccgagcgagatatcaacgaactctgggcggccaacgttgaagtcattaaaacggccctcgcgcagtcggggatcgacgccagccagatcaaaggcgtggcggtcaccggccacggcaacgggctgtatatggtggatgaaacgggcgccccggtgcgcaacgggatcatctccaccgatagcagggctaagggctgggttgaaaagtggtaccgcgacccgacgtttgtcagcgacattttacccaaaaccatgcagtccatctgggcaggccagcccgtcgccctcctcgcctggctgaaagagaacgagcctgaagcgctgaacaacgcgcgctacatattcatggtcaaagatctgattcgtttttatctgaccggcgaagcctttctcgaacttaccgatatctcagggactaacctgatcaacgttcgcgaccgtgactatgacgcctcgctgctggcctggtgggggctcggcgatctgcgcgacaagcttccgcccattaaacgctccaccgattgctgcggctacattaccgacgacgtcgcgcagctaaccggtttgtgtgccggcacgccggtctcgggcggcgtgtttgatatctcggcgtcatccgtcgcttccggcatcaatacgctggataagctggcgattattaccggcacctggagcatcaatgaatacgtgaccgaccatccggttatcgaccgggatctctttatgacctcgatttatccgattgagggcaaatggttaattaccgaggccagccccacatccgccagtaatctggagtggtttatcaataactttatggaaggcgatcgcaccgccgcggcggcgcagggatcgtcagtctacgatctgtgcaatgatctggtctccacgacaacgcccgccgagagccacctgctgttcttcccgtttgtcttcggctccaacaccatcccggacgcctccgcggggtttatcggcctgaatagcttccataaaaaagcgcattttctgcgcgctatctacgagggggtcgccttcagccacctttatcacaccgaacgtctgcgcaacatcaaccctgatctaagccgcaccattcggattgcgggcggcgtcactaactctgcggtctggctgcagatattcgccgatattttccagtccaccctggagattgtcgacgtgaaagagcacggcaccctgggcaccgcgatgaccgccgcggtcatggctggctggtttgatgacgtctttgttgcctcaaatgagatggttcacgtttcgcgaacggtcacgccgaacccggataataacaaggtctatcaggataagtatcagctctacaaaaatctgctatcggaaatgcagtctccgtggaaaagctgcagtaactacattacgcattaagcgaggaaagtatggatctgaatttacaccaccgcacggctatcgtcaccggcggcgcaacgggactgggcaaagagtttgtcctttccctcgccagagaaggggtcaacatctgcttcacctatatgcgtgatgaggagcgcccggagcagctgatcgatacggtaaaaaatagcgccagcgtcgagattattgcggtgaaaaccgatctttccgatgagcaaagccgggagaatctgttcgcgacctgcattgagcggctggggaacgccgatattctggtcaacaacgccgggatctggctaagcggctacgtcactgaaatcacccagcaggagtgggacagcgtgatgaacgtcaacctgaaggcggttttccacctgagccagctgtttgtcaaccactgcctggcgaaagatcgggccggcagcatcctgaatatcacttctcaggcggccttccacggttcgaccaccggtcatgcgcattacgcggccagtaaagcgggcctggtggcattttctatctcgctggcgcgcgaggtggcgaaacagaaaatcaatgtcaacaacatcgccgtcggcattatggataccgcgatgatccgtaaaaacattgagcagaatcctgactattacgtcagccgtattccggtgggccgggtagcccagccgcacgaaattgccgacatcggcgtcttcatggtctctccgaaaaccagctatatgacgggagcgactctggatgtcaccggcggtatgttgatgcgttaatttatggagaatcattatgaaatgtctggcaattgccgatctgtttatcaatgcagcgatgatggacgcgggtctgaaagcgctgaaagataaaggcattacagtggaagtgcgcgaatggtcgcacgaatcgattgaaaaactgcaggaggataatttactggttgaacagcaaggctccgaagcggtggcgctgcctgccgccctgcttcagggcgctgaggaggttgagatcctgatcgtccagttcgccccggttaacgcggcggtattcgacaagctaccaaagcttaaatacgttggcgtgctgcgcggcggcattgaaaacgttaatcaggcggaggccaaagcgcgcggagttgaggtaatgaacacgccggggcgtaatgcccgcagcgtggcggagtttaccgtcggcatgattctggcggaaatgcgcaacatcgcccgctcgcatgatgcgctgcgcgataagttctggcgcaaagagagtccaaaccaccgggccattcctgaactgggcggcaaagtggtgggtctggtcgggctggggcatatcgctcagctggtggccggcttcctgcgcggtttcggcagcgagattatcttttacgataagtacgtccccggccatgacagctatgaaaaggtggattctctcgatgagctggttcgccgtgcggatgtgatttcgctgcatgcccgcatgaccccggaaacggaaaacctgattaacgtacatcattttgaattaatgaaggagagcgccattatcgtcaataccgcacgctccggcttaattaatgaaggcgatctgatcgctgcgctgcgggacggtaaaatcatgggcgccgccctcgacacctttgatgatgaaccgctgccggaggatagcgcgttttattcgctgaataacgtcacgataacgccgcatattgctggcagtactattgatgccttcagcaattcgccgaagattttttctgagatcttgctgaagcaactcggttaaatattaaaagagccgcttaaggtttttgctacggcccattgggcacgggttcgctcgcgcccaattcggccgccttttaaggaaatattatggatattatcaacagcattattagtctgggggcatcagtgatgatgccagtaatattctttattatcgccctgtgcttcggcgttaaaattggcaccgcatttaaagccgggatgctggtcggtatcggttttgaaggggtgggtctggtgatcggcctgctgttgaccaacctcggcccggcgtcgcaggccatggttgaacgcatcggtctgcacctgacggtggtcgataccggctggccgaccgcctccactatcggctggggctcgccgctgatgctgccggtggtcgtgggatttattgttatcaatatcgccatgctgctgcttaaattaaccaagacggtaaatatcgatatattcaactactggattttcctgattatggggtcggtcgtgtatgccggcaccggtaactactggctctccgttggcattaccttcggcatatttatcttaaccctgctggcggcggatttaaccgcaccgtatttgcaaaaaaactataatcttaaagggatatcattcccccatcttacctgtataacctacgtgccgtttggtattgcctgtaactatattattgataagatcccgctgatcaataaaattaatttcgacccggaaagtattaataaaaaattcggcgtcttcggtgaaccgctgaccctgggcttcgtgctggggctgctgctggccttccttgccggatacgatgttgcagccgcggtgtcgctggcgattaaagtttccgccgccatgctgctgctgccgaaaatgatcgaaattttagtgcagggtctgcttatcgtgcgcgatgctgcggaagcgaagctgaaagcgaaatttcccaaccgcgacttctatatcggcatggataccgcgctgcttattggcgaaccctcggtgctggcgaccgggctgctgctgatccctatggcggtggtgctggcgattattctgccgggcaaccgcgtgctgccgtttgtcgatctggcctcgctgatgttcctgctggcgatggtgacgccgttctgcaaacgcaatatgttccgcatgtttatcaccggcacgctggtggtcacctgtattttatacgtcgggacggatatttcgcgggaatacacccaggcggcggtcaactctaacattccggtgccggaagggatggcggaaatcaccaatatcgtgggcggagccaccaccccggtgggctggctggcggtgaaattcggcgagtttttcagtaccgcgccgtaaactcccccttttctcactcagcccggcgcgggaaacggcgtcgggctttttcgtctcgccctgcgttcaagcacaaaaaatgcctgccaggagggtaagctggcagacatggttcaataaaaggcgttgttttagaactggtaggttatgcccacggcaacgatgttatcggtgctgatgctggcatctttggtgaacctggtgtcatccagcaggttgattttatagtccacataggtagacatgtttttattgaagtagtaagtcgcgccgacatcaacgtattcaaccagatcctggtcgccgtagcgtcccagatctttaccttttgatttcaggtaggcgatggacggacgcaggccgaaatcgaactgatactgggccacaacttcaaagttctgcgcggtattggcgatatagcctttaccaaacttcgtcatgttgcgggtttccgcataggtggttgccaggtagatgttattagcatcgtacttcagaccggccgcccacacttccgctttttcgccacgggcgtagaagtcaggattcacgcgcccttccctgacctgcgcatcggtgcgatcggatgccgcgtaggccgcgcctgcgccaaatccttcgtactcataggtcgaggccagaccccagccgtcgccatgctgtttcgccagatcgcgaccgttgccctcttctttgccctggtactgtacggcgacgttcaggccgtcaaccaggccgaagaaaccgctgttacggtaggtggcaacgccggtggtacgcgcggtggcgaagacatcggtctgggtccaggtatcgccgccaaactccggcagcatatcggtccaggcgccgatatcataggcgacgccgtagttacggccgtagtccagagagccaaattcgccaaacttgaggccggcaaacgcgagacgcgttttgtcgccggagttgtcgccttcaacgttattggcgctgaagttatattcccactggccgtagccgatcagctggtcgttgatctgggtttcacccttgaagcccagacgggcataggtctgatcgccatcctcggacttatcgctggagaaataatgcaggccggtcactttcccgtagaggtcgagtttgtttccgtccttgttatacacttcagctgcctgcacggttcctgcagcaagaagtgtagagacggccactgttagtaattttaatttcatattatttcgtccctaactattaataaaatatcaaatctcagatgccttctgagcgaggctattatgcgataattcgcaaagagacttgaaattaaaagttccagttttttagactaaataccataactgtgacgacaacagcggttgttaattgatgtccatcaatcattcactgcttccgttggcaaatattctgaatcacgccttacgcaacccagagatgcagaaggtttgactaaaatagataaattatcataaggaaattctaatgattagataaattaaagattgtaatttgttaaaacaatataaatcaatagtttataatttacacaaccaatcattaatgtttattcataaaggcactgattcccctaatcggctattaatgagtatattccgatccttccccgcagataaattatagtgccgaaatgaccacatttctttattgaagtttctttacaaaaaccgtaaaaattatagcatagtggtttaagatgtgtttaacactttcgtgaaagggatatcgccagccctatttcaggggataagtttaactatgaataaatactatgaataaatagagccaggagcttgtcaccagtttgataagccgctgacgcgccgggaacggcttatccgtatcgggggtaaaaggaagctggcgcgggactgctccccgcgcaatgcctggattacagggtaaaaccgccatcacccacttgcgcccgggcgtaccacttcattagctcggcggttcccggcgcgttttcagctggcgcccacggggccgcgtcttgctcagaaaccggctggtaaccaccgtatttaacctcaaaaattacgccgcctttatccatcgacagcacggcatgccaggtacccgccgccatctccagcaccttacactcttcgcctaacaccacgcgctcggtcacgttgccagcatcatcaaaggtcaacaccacaaaacgtccgctaagggatgtcagcagttcaaaagtgtgcgggtggcggtgaggccgaacataggtacccggctccatagcgacggccaggcgttgcaccggatcgcttaagtcagggtggaaattacgatgggcacgtaggcgaggcgaagctgcagcctgttcgctttgttgccgaaggtcactcaacgtcatttgtttcatataagcctttattgtagttgggcagcttacggcaatcaggttgtcgtaaggcttaatgctattttcaacagacgattagcttcgccgctcgcggaacacatcgctgtgcggattatagacgctgatgccgcggtcccaaagcgccagaaatgacgagaacagatcgtggtggggttccgttgtcccccgctcgccctttgaggcaagacatgggatagatgacatgaaaaagagacactttgtgagtgcgctccttaacagtcgtggcaggtggaaaataagatgagagtgcgaagataaaggtatagtcacgcatacaggtgcagcaattaatccggcgtaaatttatcgagcagcgaaaaagcgtgtaaataattagacagcgccagtagcgcatgaaatgagttaaagccgaacttctcaattaatcttcttttatagctgctgtaggccttgggcgaaatgccgagcagctccgggtaatcttttgccagtacggtaaatttcataataaaaatatactgaaattctctctctgttaacgtgatgtcctctcccacggggataccatcagtcactctggcgataatactggcgatatgtgcggtgcgccttttgtttatcaaacaaataatattaccttcaacccggaaacaaacaaaattctttttcatttcaaagctgtttatcaaaaaatggaactgcgcgcagctgctggatgcgtactttgttaagcacaaatcgaccagattcgcctttctgaccgcttttatgtcgtttattttcagacgtatggctttcttaaaaaaatgattatggctgaaaatagttaacattcctttccctcatgaaagtgcaatcatcctttatagaaatacgtataataggcgccatggggatatacccatgaatgaagtgggtgaattataagtttgtttaatatttattgtccagacgagtgaatttcagaaaaatccctgcgaaatgtaaaccatgggattttcactggcccggagacagcgctcatccccacgcttactttaggatttttcttacgatgcatcggttaaagagagattagcagcatatcactctgcgataaagatgatacttaacaaataacattgaaaaatttaatttatcaaaacataaaactaccaatgagggaattgcgcatgaaccgaagcgcatgcgcgcgctgacttccgggcatttgtttgcccttcgtttaagtctgcgccaggcagcgacccggcgcgactcagtttatgaacggtttctggccagcagaataataatgaagagtccgccgatgccggccgtaatgatcccgataggcagctcctgcggagccagcagcgtcctgctgacgatatcaccgccgcacagtagcaccgcgccccacaggccgcataaaggaagcagcagcagatgttttacgccagaaaaatagcggcacatatgcggcaccatcaggccgataaagccaatcaccccggtcagggccaccagcagcgacgttgctaacgcgcagcagaaaaacacctccatgcgcaggcgtgtaacgttaatgcccagcgactgcgcggtctgctcaccggccagtaagccatccagggagcgccagcgcaggagtatgaatgcgccgagaagcagcagactgaacagggcgtagggcaaattatcccagcgcgccagaccgagcccacccagcgaccagaacagcaccgagctggcggcccgctggtcgcccgagaaaatcagatagctggtcagcgcgccgaataaaaaggagatcgccaacccgcagatcaccaggtgctctgcgccacgctgctttttaaaatgaaacagcagcatcaccgccaccgccgagcagatgccgccaacgaatgccgacaccggcagcgtcagcgcgccaagccgctcaccgaatcgggtgatcaccagtaccgctcccgccgatgcgccggaggaaagcccgaataaaaaaggatcggccagatcgttgcgcgtggtggtctgtagtagaccgcccacgatggccagcaccgcgcccgccagcaccgccagcagcgttcttggcacgcgcaaatcaatgacaatacgtccgatcatctccgaaaccggcacatccagcagccgcaaggcgccgagaacctgggtaagcgacagcggcacgctgcctttagccacgctgaacagcatcaagccggctaataacggcagcgccccccacgcggcccagtagtagcgacagtgagccccgctcattggtgggccgcaggatacatcgcatgagccagcttttcggccgcgttgatattcgccggcccgggcgtcaactcagcatattgcagcttcagataacgctgctgcttcaccgccggcgtctgtttcattaacggatgattttcgaggaaacggcgcagcgaatcagcgccgctgccggtctgataatcaagaagaataataaaatcgggttccgccgtcgccacgctctcccaggaggtggtcccccagctcatctccaggtcgtccatcacgtttttccctcccgccgcttcgataatcgcggtcggcatggcgtaccgtccgctggtaaagggcttatcttcgccggaatcatagacaaacacctttaatggctgcacgccccgcggcggcttaggcagcgcattcagcgtttttttccagccgtcgaccagcgtacgggcctcttgctgcttgccaaaaatcttacccagcgtcagctcatcgttatacagcaggtccatactcgctttttgtttctgagaggcggtaaagacgcagctctcgctcagcacaaaggttttgataccgtatgtttcgagcgcggaaggcgtgacctccccgccgaccttcatgccgtaattccagccggcgaaaaagaaatcaggatttgccgccagcagcgtctccagagagggatatttcggcgccagctcgggaattgatcccatctgatgtttaaattccggggtcattttgtaccatccggtaatgccggttaagccaacgatgcggtcctgcaacccgagagcaaaagccatttcagacatattaaggtcgtggatgaccgcccttttcggcgcctgagtgaaggtcacaggcgttccgcagctgtcaatcgtgacgggaaaatccgccgcgttcgccgctgaaataaaaagaaacgccatcgtccctgcaaaccatttattcatgctgcgttatcctccggaaatttatcaggcatagcctggcacctcaaaaatccgcagcgccttcccggtcatgggatgcggtacggtaaagctggtcaagccgaagaccgggtaaagccgttgtgaaacaagcacgcgctccggcacatcccaggccacggcgcgcccttgcgataaaagcaaaacccgatcggcaaaggcgtcaatcagggaaagatcgtgcaataccgcaacgaccgtgattccctggcttttcactaatgacagcagctccactctgccgtggggatcaagatggttggtgggctcatccagcagcagcagttttggcgcctgggccagtacccgcgccagcgccgcccgttgtctctcaccaccggataacgcggagagcggtcgcttgcgcagcctctgcaatcccgtatcgttaatcgcgcgggttacgatgatgtcgtgctcgcgacgcgacatatcccgggcgtggggaatccgcccgagggcgacataatcctcaagcgccagacgcaggtcgggggtatcattctgcgcaagcaccgcgatctgccgggctcgctgctgccgggttaatgcggcaatggagcggccatataaccgaacgtcgccctcccgcgacggcagttggcaatctatcgcgcgtaataaagaggttttcccgctgccgttgggcccaatgacggccagacactctcctttaccggcgctgaaatgaatgccggagagcatttccccgccgccgggccgcggtaatgatgcgatattgacgctaagcacgggatcatcggcttttccactcttggtcaaactctcctccattagccgccgctccctctctcttcagcgtggatgagcgaaacacgcgctcttttgatttttgatcggcaggtagtgatgataatcattatcatttaaaaagaaaggtaaatagtcacatattttataatgtcataaatgttatgatataacataccaaaaatgaagtgagaaatgcaacccgcgctgccctcatgccaaagagaagcgacaaaaccacgtggagttgttctaatagccggacagtgctctcttgcagcaaactcagtgaatgtgaacaggaaacgtcaggatgaaaacggtagagtttttgctttacacccttaaaccggggaccgggaacgagtttcaccggataatgaaggaacaaagcgccccctgtcatcgcgccgccggaatggatatcgtctccttcggcaattcagttgatgacaacgacgcttattacctgatccgggcctatgaggacctgacgcatttaaacgcatcccaggcgcacttctacagcagccccgcctggcgcgaaggcccgcgacaggccattatcgacaggatcagcgtcagcgtaaaaacggttatgctgctgagcgacagcgcgattgatggcctgcgaaacggctgaccctccagggccgctggcgtggcccaacaaaaaacgcgctctcttttgctgtcgcagagattctggggcccgggcaaaatgcggctgccgtgcctgcctccgacgccaccgttagttctgattcaacgactcaagaaagccctggggcgtcgtgtcgcccagctttttttgcgcccgcccccggttccacagcgcgcacagccgctgcagcgtcgcgtccggctcatccagcgccggaataacgtcggctaatcgttcgctgagctgtaccgctccgcgctccgccatcgccaccgtccggcaagagagatgcgcgcgcgcgggctgaaagcttttatgagcataaatctcaagacattgtatacgcgccggacaggcgttcagcgcctcggtcagccagctatcgaccagcgcgggagagatcccgcaatagatgcggccaaagcaccaaccgctgatcggctcctgcgcccagagcagatgatgttcaccgccgtcgtccatcgacagcgccagctggcgatagtgcagcgtcagggtatccgcgcgcattcccgcctttaacgcttttttcccctgcagcgcggcatttttccgtccttcatgggccggacgcagatagcggtttagcgtggcgcgggaaacagcgatgcccagcccctcattcaccataaacagcagttcgtccagcggggcgcgcagcgcatcgcggagggcgttaatgagaatctcctgctcttgtctcagtactttgtgtatcaaatgcggcgtggtgtggttatcggaaatctggctgcggttgcgccagcggcgaaccgtagtaatggaaatccccagttcctgcgccagttcccggtcgcttttcgtcgattcctgaagatatttacgcgttctgggggtggtggtggcattagcgtgcagcttgatttccatacgatcctctaccggaaatataactaatcatatgagatatatattattgcagagaatacaatgtgaaccgcttcacctttcagcccaccgctttctctcataatccgccatagataacacacacagccctgtcgatcttgtacggagttcacaatgaacaatgttctgggatttcttgaagccaaactgatgcctctggcggcgaaaaccgcccagcagcgtcacctcggcgctattcgcggcgcctacgtttcattcatgccttttattattgtcggttccattctgctggtgatctcgtcgttccccaatcagagctaccagcagtttatggccagcaccttcggcgcgagctggagcgcaattatcgaaattccgttcaacgcggtattttccacaatgtcgctgtttatcagcttcctggtggcctaccgtctggcggagcactacggcgatgaccgcatctcctgcggcatcctctcgctggtggggtttctgatcctcacgccgttcattaaggtcgctgaaaacggcggcatcacggtgatccccgtggagtggatcggcaccaaaggtttattcgtcgccatgatcggttcgctgctgtggaccgaactcttctgctggctaaaacgcaaaaagctggtgattaagatgccggacggcgttccgcccgccgtgcaggagtctttcgccgcgctgatcccggcgctgctggtgatgattctgatcctggcgattcgcatcgggtttgcgcacacgcactacgccaccatccaccagtttatttatgaggtcgtcgcctcgccggtacgccattacggtacctcctacttcggcgcgctgatgaccgttttcagcattaccattctgtggtcggtcggcattaactccggttcgatgatcaacggcatcattcgtccgctgtggatggaaaatcagaccgacaacatcgccgctatccaggccggcgtcaccccgccgcacattatcaccgagcagttcttcgatatgatctggatgggcggcgcgggcgcaacgctgtcgctggtgatagcgatgctgattttcgcccgcagcaaaaatatgcgcgaagttgcccgcctcggcgccggtgcctccatttttaatatcaacgaacccatcctctttggcctgccggtgatcatgaacccgatcatgctgattccgtttaacctcgtgccgctggtgctggtcacggtgcagtacacggcgatgaagatcggcgcggtggccgtcaccaccggcgtctttatcccctggacgctgccgccggtgatcagcggttttatcgtcaccgggcatcttagcggcagcgtgatgcagatcctcaatttgctgattggcgccatgctgtacctgcccttcatgcgcatcgtcgataagcagtatcgcgcggcggaagtcaccgcccgtgctgaaacggacaacacgcttgcaaaacaggagtaaaccaatgtggggaatgattgccacctggcgaatggcgctggaaggcgttaccgaagccgcggcggcgctggcatccggcgctgataccgccagcgccgtggtcaatgcggtggcggcggtagaagattttccgctgtacaaatcggtgggctacggcggcctgccgacggaaaacggcgaggtcgaactggatgccgcctttatgcatggcgataccctggccttcggcgcggtcggtaatctggtggatattgccaacccggtgaaagtcgcccacgccctgagccgtcagcgctacaacagtctgctggtcggccagggcgccagagagtgggcaataagccagggattcgccgccaaagcgatgctgaccgaacgcgcgatgcagcattaccggaagcgctgtcgcgaaacgctggataaaggcctcagtccttacgacggccacgataccgtgggcattattggccttgataaacagggttccatgagcgttgccacctccaccagcggcctgtttatgaaaaaacgcggacggctgggcgattcgccgattatcggctccggtttctactgcgatagcgagaccggcgccgccacggcgaccggcgtcggtgaagatctgatgaaaggctgcaccagctacgaaatcgtccggcgaatggcccagggaatgacgccgcagcaggcggcggactcggtggtctgcgagctggaagacaaactgatgtcgcgctttggccgcgcgggcgacctttcggtggtgtgcatgaaccggcgcggcgaattcggcgccgccaccaatatcaaaaccttctcctttgtcgtcgccagcgcgacgcagccgctcaccgtgttctgcgccgagcgcgttcgggagaaaacccattaccggccggtggacgacgaatggatgcaggcctatgccgcacgcattcgcgcccccatcgaggagtaagccatgctggattatcgtctgattaatcaactggatagcgactgcaccggcgcgcatctggtgacctggcccggcagtacgctgctggcccaggccccgctcaatgccgttcccctgctcgcggaaatggtggaacaggccgcccgcggcgaggtggcggatacccgcttcggctgctcccccttcgcccgcatcaccctcattccgctccccctgtggagggatacgctgaacgatggcctggccgaggcgctgcggccgctatgcaaaaagccggtgagcgaaacgcttatcctcgacgcttcgctggaagagagcagcggcgcgttaaccaaagcgctgcgcgaactgtttaatctcgactggcagcttgatgatttgggcctgcatcaggtgaaagccgccaggccacgcctgcgccagctcgccctctacgccttacccgaacagcggtcggcgctggacaccctcgcccatcgtcaacgggccacggcgcacggcatgctcgccgcgcggcgtctggcggatctgcctgcggagcagtgtaccccgcagtacgtggtggaagaagcccggcgtctgtgcgcggatatccccacgctgcgctgcgaagttctggatgaaaaagcgatcgtcgaacaagggctcggcctgctgcatgcggtgggtaaaggcgctgaacgcccgccgcgcctgctggcgattcattatgatggcgtccgcgagggcccggttcgctgctacgtcggtaaaggcgtcacctttgataccggcggactgtggctcaaggaaggcgccgggatgtacaccatgaagtacgatatgtgcggcgcggccaacgtccttggcctgatgctgagcatcgccgagctggcgctaccggtgcgggcaatgggcgtactggcgctggcggaaaacgcgattggccccgccgccatgcagccgggcagcgtcgcccgggcctgtaatggcctgacggtagagatcaataataccgacgctgaaggccgtctggtgctttccgatgccattgcctgggcgagccagcggcatccgcaggcgcactatattattgatattgcgacccttaccggcgcggtggttaaggcgctgggttacgatttgagcggcttgatgacgcaaagcgacgcgctgcgggcggggttaacccgggcagggataaaaagcggggatgaggtctggtcgctgccgctggatagcaggctgaagaagcagaccgaaagcgcaatcgccgacctgtgcaatacgcccggcaataatgcggccatcagcgcctccgccgcctggcttttgcaccatttttgcccgccggagatcccctgggcccatctcgacgtcagcggcacggcgctgtggcgcgaaggcggtaaaagcgtcgcttccggccggccgattccgctactgattcagcatctgctcgacgatatcgacgagagttaacaccctccccggaggcgatgctgcgcatctgtccggactacgggttaccagcaatttgcggccctgtagcccggctaagcgcagcgcaagccgggaagaagccacagcaataccacgtcgcggcatattccccgggttgcggcgtaaacgccttacccgggctacggttaccagcaatctgcggccctgtagcccggctaagcgcagcgcaagccgggaagaagccacagcaataccacgtcgcggaatattccccgggttgcggcgtaaacgccttacccgggctacggttaccagcaatctgcggccctgtagcccggctaagcgcagcgcaagccgggaagaagccgcagcaatgccacgtcacggcatattccccgggttgcggcgtaaacgccttacccgggctacgggttaccagcaatctgcggccctgtagcccggctaagcgcagcgcaagccgggaagaagccgcagcaatgccacgtcacggcatattccccgggttgcggcgtaaacgccttacccgggctacgggttaccagcaatctgcggccttgtagcccggctaagcgcagcgcaagccgggaagaagccgcagcaatgccacgtcacggcatattccccgggttgcggcgtaaacgccttacccgggccacgggttaccagcaatctgcggcccggtagcccggctaagcgcagcgcaagccgggaagaagccacagcaataccacgtcacggcatattccccggggctatcggcaatctgcggtgctgcagccctactcctcactcacgacaggcttaactcttaccgcaaacagcactatcaccatggcgctgaccagcagcacgccgctgccgacaaaaacgccgctcgcgccgttgagatcgaataccgcaccgccgccagccgcaccggcgctaatcgccagctgaatagaggccaccagcaggccgcccgcgctttcagcttcatccggcaccgtggtggcaagccaggtcgaccagcccaccggcaccagaccaaaagcaaagccccacatcgccaccagcagaccgtccagcagcgcgacgtggccgaacgttaccatcatcagcgccagcacgctcattgccagcggcaccagcgccagcgtcaggcgcaggcttcgggccaacagatgtccggcaatcgaggtgccgataaagttcgctaccccaaaaccgagcaggatcagagaaaccccttcgacgctggcctgcgccacggtttcgaggaacggacgcagataggtaaagaaggcgaagtggccgctgaaaatcaggattgtcgcgagcatgccgccaatcatacctggccgacgcagcaccttaaacagggtagcgaagctgccgacgctctccggacgcatggaaggcagaacccacagctgccagagcagcgcaaccacgctcggcagcgcacagataagaaatacgttgcgccagccgatcagcgcgccgaaatagctgcccagcggcgcggcaaccaccgtcgcgatggaaacggcggaaaagataatcgccagcgctttcggcaccatcgccgccggaaccagacgcatggtggtcgcggtcgacatcgaccagaagccgccgatggcgattcccagcagcagacgccccagcagcaaaaactccagcgaaccggcgaaggccaccatcatgctggagataatttgcaaaacggagaaaaacatcagcacccagcggcggtcaatatttcgcgtcgcggtggtgatcagcagcccggtaactaacgccaccagcgccgtcgcggtcaccgcctgccccgccataccttcgctaacgcccaggcttgccgccatcggcgttaacaaactggcaggaagaaactcggcgacaatcaggccaaacacccccagcgccagcgcatagacggcgcgccacgcgggcctggcgttggtctggctctcttcagctgcaatgcaggaactcataaacatctctccagaacaattaacatttcgttaaggttaggcggttctgttcggacgatctatgatgcatactccttgattattgataattcgtccgggaatgatgttatgactcagcacgccctcgatctcaccagcgaacttctgcgcggcatgcgcctttccggcgtcaactaccgccgcatcgaaacctcccgtccttttggcgtcgaattcggcttcgtacctggtaaagcgcagttccactttatcagccggggaccggtactgctgcgcatggtcagcggtcagcgcctgatgctgcagagcggcgatgcgctgtttattccgaacggcgatggtcacgtgctgctctccgatgaccaggcaacggtggttaacgtgtccagactgcccagcgaaccggtttgcggctcggtaagctgcgtcaaaaacgcctgcgacgacgcgaaaagcgacagcgccattatcttcagcgcctgtatggactttgagctgggcggtatgcagccgctggtcaaagcgatgcccgaagtgatgctggtcagcagcctgctgaccagccgtccggagatcccgccgatgctggcggccatggaacgcgaaagcctcactcgacaggcgggctacgccggcattctggcgcggctggccgatgtggtcgccgcgctgattgtccgcggctgggtggagtgtggctgcggcaacgccaccggctgggtacaggtgctgcgcgatcctaagctggctaaagccatttacgttatgcatcagcagccgggcattaactggaaagtcgaggatctggcccgcgaggcgggaatttcacgttcggtatttgctgaacgcttcctctccgccaccggcaccacgcccgcccgctatctcaccgagctgcgtatgcgcctcgcggtgcagtacatttcccatgagggtcaggcgctggaaaaagtggccttcaggctggggtacagttctcatgccgccttcagccgcgcctttaaacgcattatcggaaaggcgccgggcgcgctgcgcgatctgtcgcgggaagaaggattttagcactgtcccagttcacgggtgcgcctgaccgccgccagtacgctgcgctgaagcccagcggcaaaatcgctgttgttcagctcatacagaccgtggatcccgacgcctgccggggagttgttgatatccagaagctggcgcggatgcttctggctttggcgcagcatctcgaccgcgccgagcaggttttcctgcaccacctccgttgcctggggccgcggcagccccgccagtacgccggcatcggtaagggactcaataaagtagtaaatatagttagggcccgcgacgccaaagccggtaaagatatcgatcaaccgctcaggcagatacagcactttgccaaagccgcgcagaaacggctcgatctcagccgcgctggcgtgggggtttaaggtcacgccgctatagccaaatccggtatcggtcagggtattggggatcgccctggcaatcggcgttgccgcaccaaacagggaggccagcttttccagggtcacccccgcgatcagagaaaccaccgtcgtcgagccgtttagctgcgggcgcacgcggttcgccacccccgccagatcgtcctgcggacggatccccagcaccagcaaagaggcctcgtttacgccaccgtcgcccgacagccgataacgggcgcgcagagcctcgactcgcgcgctgtcgatatcctccagcgagatcgcgtccgcccgcagcgcaccgtggcttaatgacgcgcgaataatcgcctccgccatctgtccggcgccaataaaatggaccctggtcatgagtcttactccttattcaaaaagatattcgccgttgccaacgcgaaagcgtcggcctttgagcgccgggtcagcaacgcgaaacaccagttcagtcagttggttcgccgcgccctcacggaaaagaaactctcgaccgcccaccgccagcccctgctcgccttgcggggcaaagccaaacagcagctgccagcggtcgcgcaccgcctgaggatgctgtaccgtgaaaaccgcgcgctgcagttcaatctcccccagaggatgcggcgcagcgagaccctgtgcctgcaggcggctcagccgggcgtcatcctcttccccccattgcagaatgaagggatagaccaggccgtcaaaatcgccgtcaatggtgaagatccgccagcggataacgttgccctgcggatcgtcgcgctggccgttgacgatcggcgaaacccgcaggccctgctcgtgcaactccgcatgcgtgcgctcaatatcgtcgctacgcagcgccacccgatacagcgcttcattatccggcagcagccgcgacgcatcccgggagagtaaaaacgtctccgcggcggaaagcagctctgcatcatcggcaatcgccagaaattcgatataggtcaggccgaaatagctcagcgcattcctggtcccccaacccgggtggcgcccaccggccaccgcgttgagcttttgcccgctcagcgcctgaatcgccgcttccggctgattaacaaactggaccgcgtggtcccacgttaaggttgccattcgccctcccgctcctctgcctgataaaaacgcagccgacaggcggcatcgccgcgagccagcgcggtctgcacctctaaatgcagccccggaaacgcgtcggttagcgcacgatcgccttccatgcagatatcgcacagcgtctcaatttcgctggcgcctcgcccctgctgccgccagcagttgacatagggacagtagtgaaacaggacgataaattcggcccggctggcgctaacgggctccatctcataaacctgagattccagtccgcgggtaaacagcccggcaaactcctgcaaatcttttcgatcgcgcatttgcgcgcgcagcttatgcccgatatcgcggccatagtggcgtattgcttcacggacagaatcatccgcgatatggcgttgtcggctttcgtccaacaggtaaccgatcgttgccgcgcgtttttcagtaatggcgcgcagcgccagggtcacctcatcgtttatggtggcggcgttatgcgccggttccgagcttatttgcgtcatgcgcttattcccagtcggtattcactttcacgtcgctggcgcccggcagggcatacacatcttcggcgtaccatttccgcgagagctcagcgagcgtgccgtcctttttcagggcaaccagctgcgcgtcaatcgctttgattagctgcggatcggtattttttttatacaaatagacgttaggaaacaggccgacggaatccgacgctttcagattaagatttagcgccttatttaacgccagcagcgcgccaatggggtaaatcgccgcatcgtattccccggaggctaccgctttaaagatatcggcggcggactgctcgccgttgggctgcaggttaatttgttggcctggatgttttttattgtagttttcaatcaccgtataacgggcgtcggaggtatgaatcggcaccagctttttcttcccgctggcgagatcgccgagattatgtatatcgttctcatcattacgcacaatcaggcgcaaatcgctgatcccggtcggctcgccggagtggtcgtatttttccgcccgctctttggtgagataaaagtgatccgccgcgagggtataggcgccggtcgataggccgacgatcatcgcatcgcgcgagaccgcattaaaatgaaacgtatagtcggttaaacgctggtccagcacctttaacaggtcgccatcgtaaccggtaatattgttgttatcgtcaacaaagctaaagggaaaaccgttagcattgacgacaacctcaaccgttttcgcgtttgcgcttttttcaacagcctgcgcggcgttcattcccattgccaacgccagcgcactcaccagtaaaattttatttttcaaaataccttccccaaaatgataaccgtgaaacactcttttctgcgtttccttgccagcgggcgctcagaaacctttctgcactgcgcaatgctctggcaatcgccaggcacagcacgatataaatcaccagcacgacgcagtaggcttcgacaaaatgaaacccgcgcgcggcggcgatattggctttcgccatcagatcaacaacggtgatggtgtaaaccagcgaggtgtctttaatcagatcgatcagcacgctggtaaagttcggcagcgcggataccgccgcctgtggaaaaataatgcgtcggaactgcgtgaatccgcttagcccgattgaccatgcggcctcgcgctgccccttatcaaccgcattccatcccgcgcgaaaggtttcggcgaaataagcgctgaagatcagcgacagcgcggtgaccgccgccgccagcggcgagagtttatagcggtacatcgtgtcctgcgggccgccgaacagcccggcggcaatccacggccagacgtaaaaaaagaaatacagcatcaccagggccgggaccgaacggccaaaggagaggaataccctcgccagccattgaacgccgggtacctgacgaataatcgcccacgccagcgctgcgcccagcaaagtggaaaacagtaaggataataacgttatcgtcagggtgaccggcagcgcgcttaaaataaacgtaaaattgtcgcgaatgaacgccaggctaaacatgttaatttatcactccagcaggaactgatatttcttttcaatacgagtggtaaaatagagaataatactattcagcacccagtagacgataataacgctaataaatgccgcgacttgtttcgccccgtagctattttgcgaaatcttttgtgcccgcccaaaaacatccacaataccaataatattgaccagcgaggtcattttcacgagattaattaaaagattgccaaagacgggaatagcaataataagcccctgggggaaaataatccgccgtattccatgatgccagggaatattcaggctgataatggcctctttctggccgctatccaccgcgcgccacgctgaacgcatcatttctgcaaagtagggactgatgctgaccgaaatagacagcaccgcaaaggtggtatcgctaatccacagcggcggcagcgccagcgcggtcaaaattaatttgccgccgaagaaaaaaagcaggataagcagcgccagaggcgcgccgcgcagaatgtcggtatacccatttgccgccgcgctgagcggcgtaaagcggctaaactgcagcagcacaatcagcagcgcgatcgttaaaccaagcagcagcgacgccagcgttataccgagggtcacgggtaaattttccagcagcttcggcactattccggcgatatcctgccagctaaacagcgggttattgttcatcatcagcctcaggcatgatagtgcagttgcgcaagaaacgcccgggttcggccctgctgcgccgcgccaaatatctgttccgccgggccctgttcaacgatttcgccgttttccataaataccacccgggaagcgacctgacgggcgaacgccatttcgtgggtcacgatgatcatcgtctggcccgcggcggcaatggtctgaataagctccagcacttcaccgactttttccggatccagggctgaggtcggctcatccagcagcagaacggcggggtcaatggccagcgcacgcgcaataccgatacgctgcttttggccgccggagagactgtgcggatagtggtcttttttatgcagcaaccccacctgctttaagagtcgttcagcaatagccagtgcctcctgccgcgggcgttttttagcgtatatcagtccttcggtaatattttgcagtgcggtgaggttatgaaaaagattccacgattgaaaaaccatagcggtttttgaccgtagtttttcaatctccttttttcccgcttttgcgcaatccagcgccacatcatctattcttatttgcccgctatcggcaggctctaagaaattaagcgtacgtaatagcgtggttttccccgagccgctggggccaataatgcaaataatctcgccggaatgaatgctgagagatacctcttttagcactctttcaccggagaagcttttactgatcttattgagcgttatcataatgagatattcgtgaataatgtttatttgccgcacatcggcatttattgctgtacaaaaactatattgccgctgttcagatgatagcaaacaagaaaatcatctatcgaaagtcaaaaaataactttttatatatttgttatgacaatgaggcttgattgtaatcaaaccttatttgcaaaacaggattgcggtaatcgatattttttattcaaatttactgaataatgatagcaaattgtttcgattttaatcatcgcgtcatcggcctattatttatcaaatcggggcaacaacgctccaatactgacaaaacgcttaaggaatacgaccatgaaatccatcaaaactttcgttgcagttgccgcactctctacgatctctttcggtacttttgcgcagagcatcagcgccagcgcttccacactggaccgtgcagaagccaaaattgccgctcaggccgcagagcaaggcgcgtcttacaaaatcaccagcgctcagttcaataaccgcgtgcatatgaccgcagaactgacgaaataaactcacccgtcatacttcaagttgcatgtgcgttggctgcgcgcgctcacccgaatcacttaccagagtaagcttatcgggattcactgacttgccgccttcctgcaacccgaattatttagggtatataacaacattgccgggccgccggaagacacaggcgacagcgacaacacgatgaaataaggaacaaaatatgaaaaatatcggcgtagtcaccgcactgctgttagccgctacactttcgtccggggcgatggccgcagagaatagctttgcgcgtccggaggcaggttcaaatatcgacacgtccgtgcatcagaatcatattgatgtcagccatgcctttgataaagagagcctgaccgcaggcaatcttcagtaacacacagcccagggcgcgcgcggaattatccgctgcgcgccctactttttctgccagtgtgcccacggattatccgctggcgcttccgcttttgccgtatcggtatcggacaacgaatcgatatacaacgcttccacttctttacgcgcccaaggcgtgcggcgtaaaaacttcaggctcgacttaatactcggctcgcttttaaagcagttgatgttgatgcgtttcgccagttcggcccagccatatcgcgcgaccagcgcgtttaacagcgcttccagcgtgatgccgtgcagaggatcgtttgggtgctgcattgcgtctctttacctgaattaaaaatttcgctcaccatactggctcccgacgccaatcgcaacagtcccgcctcccccttatccaaaattcgcaaaagcacagaaccctccacggtcataaattagaaaagaacgttattggttgattattttcgcttaaggcaagctggcttcaaccacccgactgaggaatcgatcatgcgctgttgttgtccccgaaccctgaatctgcatcgacgaaaacacctgaataccgccttcggagaacacaatgaacgcgacaaacttaccgatactggatctggcccgctacgcggaccccgctgaaaaagcggcgtttctcgccgacctgcgccacgccgcccgcgatatcggtttcttttatctgatcaaccacggcgtcgatgagtcgctgcagcaggccgtgcagcagcaatcccgcgccttttttgccctgcccgacgatcaaaagcagagggtggcaatgattcactctccgcattttcgcggctacaaccgcgccgcttctgaattaacccgcggtcaacccgactggcgcgagcagttcgatatcggcgccgagcgcccggccctgcagcttagcgaacgcgcgccgcgctggcagcgcctgcaggggccgaatctctggccagaggcgttgccctcgctcaaacccatattactgacctggcaacgggaaatgacccaggttgggatcaccctgctgcgcgccttcgccgaagcgctgcgcctgccgctggatgccttcgatggcctgtatggcgataagcccaatgaacatatcaagctgatccgctatcccggccagcaggagacccagagtgcccagggcgttggcgcgcataaggactccggcttcctcagcttcctgctgcaggatgagcagaaaggattgcaggtcgaagtctcccctgaccgctggattgacgcgaccccgctggcgggcagctttgtggtgaatatcggcgagctgctggagctggcaaccaacggctatctgcgggcaacggtgcaccgggtcgtttcgccgcctgccgaccagcagcggctgtcgatcgctttcttcctcggcgcccagctggatgccgtggtccccgtctacacgctgcccgacgagctggcccgcgaagccctcggaccggatagcgacccgcaaaacccgctgctgcgcgaggtgggctggaattacctgaaagggcgtctgcgttcgcatcctgatgtcgccgagcgctactaccaggatgtttttcgcgaacgcgccgagcaattgatcgtgtagaccctaaataattcgggttgcaggcaggcggcaagtcagtgaatcccaatgagcttactctggtaagtgattcgggtgagcgcgcgcagccaacgcgcatgcaatttgaagtatgacgggtataaacataacaacaatacaaggaataaaatgatgaaatatgccgcatttaaactggcaggggttgcactgtctctctctctggcatggagttccgcccaggccgccgcgctgcgcgtcgccgcggacccggtgccgcacgccgagatccttaactacattaagaagatcgatcccagcctcgacctgaaaatcgtcgaactcaccagcggcgttaacgccaacgaactgctggccaacggcgatgtcgatgccaactacttccagcacgtcccctatctgaaagatcaggagaaagcgctgggcaaaaccttcgccgtcgctgcgaccgtccatattgagccgctggggatctattcgcgcaagcataaagattttaaatcgctgcccgagaacgccaccgtggcggtaccgaataacaccactaacctgagccgcgcgctgttcctgctgcaaaatcagggtttgattaagctggcggcaaaatttaccgacccggcgacaaccctggcgacgccgaaagatatcgtggaaaacccgaagcacctgaaaatccttgagattgaatcaccgcagatcccgcggtcgctggatgacgttgacctggcggtgataaacggcaactacgcgctggaagccgggctggtgccggccaaagacgcgctgggtctggagagcgcgaccaacaacccgtacgccaacattctggtgacaacgccgacgctggcgaacgatccgcgcatcaaggcgctggccaaagacctcacctcgccgcaggtcgccgaatttattcgtaagcagtataacggctcggtgatcccggttgctcctcagtcatgattgagattgtcgggctgagtaaaacctatgccggaacaggccgaccggcgctaaacgatgtctctctgcaggtgccgagaggagccgtttacggcatcctcggccgcagcggtgcaggcaaaagtacgctgatacgctgcctgaatctgctggagcggcccacgtcgggccgcattattgtgaacgggaacgatattacccggatggataaaaccgcgctgcgcgagtaccggctgcgtaccggcatgatcttccagcactttaatttacttcacgcccgcagcgtcgccgacaatgtcgcggtgccgctggagatagccaaagtgccgaaagccgcccgccaggcgcgggtggcggagctgctggaactggtcgggctggcggataaagccgccgcctttccgtcacagctttccggcgggcaaaaacagcgcgtggggatcgcccgcgcgctggccgcgcggccggatgtgctgctgtgcgatgaggccaccagcgccctcgaccccgagaccacggcctcggtgctcagcctgctggcggatatcaaccaaaagctgaacctcaccatcgtgctgatcacccatgagctggaagtggtgaaaaccctctgcgaccacgcggcgctgctggagcacggggagattattgaaagcggcagaattgccgatttgctggtggcgccatggtcgcggctacggcagtcgctgctgcacgatcctcaggctgagcgggatttcctcgctcgccacggttttcacgggaggccattatgcggagtagcatgagttgggaagatctctggccgctgctgcttcagggcacggtagataccgtttatatggtcggcctggcggcgctgtttaccgtgctgctcgggctgccgaccggcgtgctgctgtttgtttcacgccgcaacggcctggcgccgatgccgaagctcaacgccgtgctgggcgcgattatcaactttggtcgttcgctgccgtttatcgtgctgctgatcgcgctgatcccattcacccggctgattattggcaccaccctcggcagtaccgccgcggtggttccggtcaccattggcgcctttccgttctttgcgcggctgacggagaacgcgctggatgaagtggattacgggcgtatcgaagcgattttatcgatgggcggtaatatctggcacgtgatctttaaatcgctgctgccggaagcgctgccaacgctggtggcaggcatcacgctgaccatcgttatgctgatcggcttctcttcgatggcgggcgtgattggcggcggcggactgggcgatctggctattcgctacggctatcagcgcttcaataacgaggtgatgttcggtaccgtgctcattctggtcgcgctggtgcagggcgtgcagatggccggcgaccgtctggtccgcggcctcgcccaccgtcgttaacaataagcgggtggccgcgcgccatccgcgattaaaacccgctttcgcgcaccagggtgcgtatcagttccgctgccggcagctcgcgaatcaggctcactccctgcccggcccagtgcgcaccgtactgacgatctccctgcgctttcgccgccgatgccagcgcctttccggcgtcgtaagccacgggataagccggaatcagcggcggatcgtttatttcacgccagccgttaaccagacatctcgccgggcgtccggaaatggctgaggttaaaaccgtttgcccgtcagacgcgcttttaagggcctcacggtatccgccatccgtggacgattcagggcacagcagaaacgccgtccctagctgcgccccgtctgcgcccaggttcattacgctgttaattcccgcgccgtccatcacgccgccagcggcgataagcggaatatcggtatgccgtcttatcgtctgaaccagagtaaaggtgctcatctgcccgtcgggcgccagcggatcaaagatgccgcgatggccgccggcctcgtagccctgcgccaccaccatatcgatgccctgctctacggccagcaaagcctctgccacgctggtcgcgctcgccagagtgacgatccccttttcccgcagtcggcgaagggtttcacgatccggcacgccaaaatgaaagctcaccgccgccggagtcaggtcgagcagcagctcggccatccgcggctgctgctgaaaactcagataaatttccgccagcgtctccggcggcaagctgccaaagcgcgcaaattccgggcgcagccgcgccagccaccgggcttcacgctgcggatcccttaccgccggggcgtggcaaaacagattgacgttaaacggacgggtggttaagcgccgggtccggttaatcagcgtttcagcctgctctacggttgacgagcccagccccagcgagccgagcgcgccggccccgctgaccgctgccgccagttccggcgtcgacacgccggccatcggcgcctgaataatggggtaatcaatatcaagctgctgcgtaagcctgttgctcatggtttgccctgtttaaatttgtgcgttcgggccattaaaatctcttttagagatgataagatcaacattattttcaaattaagaataaaaatatgaaccacaccacattagagatatttaaaacggtggcgcaagagcgcagcgtcacccgcgcggcaaagcggctggggcgagcccagtccaatatcaccacccgcattcaccagctggaagaggagctgggcgtggagctgtttgcccgcggcaataaaaggatgctgctgtcccccgccggtgaacattttttgggctacgcgctgaaaatcctcagcctggccgaagaggccagacaggcgctgcatccggcgacgccgggcggcaatttacgcatgggggcgatggacgccaccgccgccagccgcctgccgccgctgcttccccggtttcgcgcgctgtgcccggaggtgacgctcaccctcaaaacccagcccacccgtcagctgacccaacaggtgctggacgccgcgctggattgcgcgctggtgagcctgccgcagggaacgcctccgcccgatgacctggagtacgtatccatctttaaagaacagctgctgctggtgcttcctgccaatccacagcgctttcgctttgccgcctttgcgcagggctgtacctaccgggcgatgggcgaagcgtttctggcgcaatcagaggaggtggagagcgagatccaggacgtcggctcctatcacgcgatgctcgcctgcgtcgcctccggcggctatgccggtatcgtgccgcagagcgtgctcgataccctgacgctgcccgaagccagccagctgcggccggttggccaggcgatcacccagcttatctggcgcaaaggctacgcgtcccccgctctcgagaaaatgcgccagcttctggagtcagcctccgacctttgacgctcgccccgcccctgccgccaccagcgcggcggcagccagcagcgcaatggcggccgcgctcagcgaaggattaaacgacccgctgcggtcatacagcgttccggcaaccagcgggccgacgatttgcccgatgccgtaggtcgcggtcatggcggcaatcatattgaacgtaaccagatgattaagccgccgcccctcggacagcgcgatggtcacggtgcccaaaaaggtgcaacccaccagcagcgcgcttaatatgcaaaacggtaacgcatggctccacgccgggagaatgacaccgattgcctgaatcagcaaattaagggtaaacgcgaggcggtagccgagcttgatcaccagccggtgccagataaagcaggagggaacggcggcgaggccgaaaatagcccagatctgcaccggatcgataacgttcagcgaaccgctgagaaacagcggaagataggtggcggtaataatgtagccgaagccggccaggccataaatcagcagcagtttccacgcctcccgcacccgcccctcgccctcctcgcggtgtgcggtcgcggcgggttgataagcgataaggtagtcggcggggctcagcagcagacgcagcgcgagaacaaaaagcacgccagagcttatcgcacatatcagccatatctgctggctggagagcgccagcgccttccccagggagataaattccgccgacaagaatatccccattccgacgccagaaaaaagcaccggcgcgccgttagggtgcttcatatgctgcagtagccagagggaggcggcgatcagcgtcaccgcgctgagtaatccggcaattccgcgcaccacaataatcgccaggggggaaaccaggaacgccagtaaggccaggcacaccagcgtcaacagtgcggaaagcaggcttagccacctggcgtccgcgggcctggctttcgccagcagcagcgcgccggccagatagccggcatagttcgccgaagcggcaagattaccttcacgcagcgtcagcagctgctcattgagcatcagcggcaggatcccggtataggcaaatcggccatagcccatgccaacgatcagcacgaccgaaccggccagcgccagcagaaaggccttccattccggcctggttgcaaaaacgttcacccacacccctccattattattctcaaataaagaatcataaataacaatcattctttatttattgtgatttcgcttgccacgatgcgcaagcagcgccatgcggcagcgcccggcctgcggggagaaactttacggcaacggccgggggatgcttcggcgagtaacgaaatgtggagtgaggcgctggacatccttgtccagagggatttaacggtggctaaaagccagtttggcagcaaataacataaagaggccgccggttgcgcggtccatccaccgaataaatagcggcgtctttaatagccgagcggcagagcggctggtcaggattagcgttaacgaccagagcgtcccgatcgccacgtggatggcgaccagcaggaacgtccagacgatgggcgagtggccggtcggaataaactgcggcaggaaagagacgtaaaagatccccattttcggattgagcacattgcccatcatcccttttaaaaaccagttacttgccggcgccgccgccctgtcctgatgaacaaaatgaccgcgcggcttgagaattaactgaatgcccagccagcataaataggcggccccgcaccatttgagcaggtcatacgccagctccgatgccgccagcagcgccccaagaccgaaggcgaccgccgccccccagataaaacatcccgtatcaatacccagtgccgcctgaaaggctttttttccgccttcaacggtagcggttcgcagaattaaagcggtatccaggcctggggtaagggtgagcaacagcgcagcaaaagagtaagcaagaagggaatctgcaacggacattttctctctccgaaagcgaagattctagataaaacccgccgcagagacaatcgaataaattcgctttgccgggcgcgttaaaagctctttgtgacaaatggccgccgcaaaagcggatacagtcaatcgaccaaacctttattgatacaggctgttatgacgcttaacgctatccgcatcgccaggccggtcaccgacctttcactcagtagccacatgtactgcactggccttgggctggagcaaatcgcgcagtttgccgatcatgacggctttagcggcgtgatggtcggacgccgcgatctcggctggcatcttgaattcaccctctgccattatcatccggtgaagccctctccgggcgaggaagatttgctggtgctttattacccggaagccgcggaatggcgggaacagtgtgcgaaaatgctgaccgccggttttgcgccggtcagcgcgttcaatccgtactggaatgtgaacggtaaaacctttgtcgacggcgacggttatcgcgtggtgctgcagaacagaagctggccgtaggcgctactccataagccggacgtcaggatggcgcgggcttgccgcttcgtgaaaaatatcgcccagccagccgggaatttccgcctccgggagatcgtccgggatgatgatctcacgcagcggcgagcatttacgctcgttcagatcgacgcggaagagtagccagcgttcgccctggcgctggacgccaatatggcgcccgaatacgtcataaatcagcattccatcaccctgccgatcgcaggggatgatgggcggctcatgcatgccattatgctttgccctcgcgcagccacggggtcacggtaatccctgtcagcagcccttccgggctcagcagccgcgtgacggtttgcccccacggctcaatgcggttgtccaccagcagacgatagcctctggccttcagcgcgtcggtggcggtgttgatatcgcgcacttcaaactcgacccacgcctgcggcaccggcagatagtcaggccagagatcggcgtcaaagcaggagcgcgccgcctgcgccagcggccacagggcaaaatgttttaccccgccgatggcgtcatgttcggtcagcagatactcttcgttaccgggcatcggttttagcggcaggcccagcgcagccacataaaactccctgctggccggcgtcgattgcgttatcggcccaaagccggcgacaaaaagcacatccataccgtctaaatcgtattccatactctctcctgtcattatccgtgatgcgttaacagattttatactctgccgcgcacgactttcccagaatcctcttttctcatgactatttttagtgcgtttgcctgaatcattgagaaaacgcatgctctgctcgttgcggctgacggcgctgcgctatgcttagcttccctttggtttgcaatacttcgcgttatgaccacttccgccagcaccactcagcttaatctgcgtattatttctatcgttgtttttacctgtatctgctatctctctattggcctgccgctcgccgtactgccgggctatatccactatcagctgggctataacccctttatcgccggcgtggtcatcagccttcagtacatctcaaccctgatcagccgcccgcatgcgggccgctacaccgacatctgggggccgaaaaaagtcgtcagtcgggggattgtttgctgcctgctcagcggtctcttcacgctgctcgcggtcttgctgcaatcctcgccgccgctagccgttgccgcgctgttggtggggcgcattttcctcggcgtcggggaaagttttaccgccaccggcgcgaccctgtgggggatcaaaaccgtcggtgcgattcacacttcacgggtgatctcgtggaacggcgtggcgacctacgtcgccatggcggtcggcgccccgctgggtgtcatgcttaacggctattttggcatcagcggatttgccgccgtggtgatcctggcggcggcggttggcctgctctatgcccgtacgcggcaggacgtcagcgtgacggcggggatcagagcgccgtttcatgtggtggcgcgcaaaatctggccctacgggctggggctggcgctgggtaccgtcggttttggggttatcgcaacctttattaccctctacttctccgcccatagctggcaaggcgcggcgtttaccctctccctgttcagcatcggttttatctgcatccgcctgatcctgggcaacaccattacccgctacggcggcgtgccggtatcgttaatctgttttgcgatcgaatgtatcggcctgctgatcatctggtcggcctcctcggcgtggatggccggaatgggcgcctttctcaccggctcgggcttttcgctggtcttcccggcgcttggcgtggaagcggtgaaacaggttgaagaacagaatcagggcaccgcgctgggcacctattcggcctttctcgatctggcgttgggattaaccggcccggtcgccggctgggtggccggttattacgatctggagactatttatttgttggcggcggcggtggtcgcgctggcatttatcttgattttgcgcatttacctgcaacaacgcgctgctttaccgcgaacctgaggaagcatcgtcgaaagataaccggcgcaaatatgggtaaaaaattaatcaataattgacggcaattcggcttccgtgccaccatcgcttcagcgtccggcaagcggcgcgatggtggtacgggtgaatatcagagaccgcatgtttaaggtccatgcccgtccgcaacctgattctggcgggaataaagacatgcaccaaagttttaatcagcgcgttcatttctattactgcattctggtggcgctgaaaatacacgcaaaatcgaagaaatcaggcggtatccgcgggaaaaataatttcctgctcaagtggctgcgtaaagcgcaggacaacaatatattccacccggatattaccagcgagatcgaatggctgcgcggcaaaatcattcaggccggctacgataccgaccttgaacccatgctcgattttgtctatgccaccgccaaacgcgcggaagatcttaagaacgccgactgattcacgcccgagccgcctggcccgggcgttgtactttagcgtttgttacggtgcgtcaggagatagactgccgggatcaccagcatcgagagcagcggcgcggtgatcatcccgccgatcatcggcgcggcgatacgctgcatcacctccgaaccggtgccccctccccacataatcggcagcagtccggccatgattgtcgccacggtcatcactttcgggcgcacgcgcagcacggccccttcatgaatcgcctcgttgagcgcgcgatcgttcagctcggagcggcgtttcgcgatcgcctggttcaaatagagtaccataatcaccccgaactccgccgccacgccggcaagcgcaataaagcccacggcggcggctaccgacaggttgtagcccagcagccagagcagccagacgccgccgatcagcgaaaacggtaaagttcccataatcagcagagcgtctttaacgcggctgaaagtgacgtaaagcaggataaagataatcatcagggtaaacggcagcacgattttcagcttcgcggtggcgcgctcgaggtactcatactgcccggaccaggtcagcgagatgccttccggcagcctgacccgtttgccgacctcgctctgcatttcatcaactgcggattttaagtcgcgcccgcgaatatccacgtagatccagtccgacaggcgggcgttttcgcttttcagcatcggcgggccgtcggtaatggtgatgtccgccagttccgagagcgcgacctgcgccccgccgctggtcactaccggcagatcgcgcagcttttgcagcgagtcgcgcatttcgcgcgggtagcggacgccgatcgggtaacgttctcgcccctcgatggtttcgccgatgttatcgccgccgacgacgctggcgacgattgactgcagctccttcaccgacacgccgtagcgggcggctttcacccggtcgatagcgatatcgatatagcggccgccgtcgaggcgttccgccagcgccgacgtcacccccggtacgctacgcacgatgcgctcaatctcttcggcggtcttttcgatctccgccagattgttaccgttcactttgatgccgaccgggcttttgatgccggtcgccagcatgtccaggcgattacggatcggcggtacccagacgttggctatccccggtaccttcaccgtattgtcgagctcctcgatcagcttatccatggtcatgccgggccgccattcgcttttcggcttgaactgaatcgtggtttccagcatggtcagcggcgccgggtcggtagcgctgtccgcccgcccggccttgccgaatacgctttgcacttcaggaatggtcttgatcagacggtcagtctgctgcagcaagcgtccggcttcgcggctggagatccccggcagcgtggagggcatatacaacaggtcaccctcgtcaatttgcggcagaaattcgctgccgagctgcgccagcggccacagcgtggcaaccagcagcaggcccgccgccgccagcgtcgccttcggccactgcaaaactttatccagcagcggctcataggcgcgaatcagccagcggttgagcggattggcggtttcatcaggaattttgccgcgaataaagtagcccatcagcaccggcaccagggtgatcccgagtccggcggccaccgccatcgaatacgttttggtgaaggccagcggcgagaacatcttgccctcctgcgcttcgagggtgaacaccggaataaacgacagggtgataatcagcaggctgcaaaacagcgccggccccacttccgacgccgcgtgctgggctatctgccagtagtcggcggaggacggctggcgttcagggtgctcgtgccgccactgctccagaaccttatgcatattttctatcatcacgattgccgcatcgaccatggccccgatggcgatcgcaatcccgccgagcgacatcatattggcgctgacgccctgatagtgcatcacaataaacgcgccaaggatccccagcggcagcgtgatcatcgccaccagcgcgctgcggaagtggaacagaaacagcgagcagaccaccgccacgacgataaactcctcaatgagcttatgggtcagggtctcgacggagtttttaatcagctgcgaacgatcgtagaccggaacaatctccacgcctgcgggcaggcttttttgcacttccgccagtttggcctttaccgcgttaatggtgctgagcgcgtttttacccgagcgcataatgattatcccgcccgccacctcgccctggccgttgagctcggcgacgccgcgccggatcgccggtccccggcgcacgctggcgacgtcggagagcagcaccggcacgccgctgcgcgcagcgataaccacctggttaaagtcgtcgatggacttcaggtagccggtggtgcgcaccatatattcggcttcgcccagctcgagcaccgaaccgcccccttcctggttggcgctctggatcgcgctaatcacctgctcgtgggtgacgttcagcgcccgcagccggtcaggattaaggatcacctgatactctttgaccattccgccgacgctggccacctccgaaacatccggcacggttttcagttcatatttgaggatccagtcctgaatcgcccgcaggtcgccgaggctatgctggccgcttttgtcggtaagcacatattcaaacacccagccgacgccggtggcatccggccccagcgacgctttcgcttccggcggcaggctgctctggacctggctcaggtactccagcacgcgggagcgcgcccagtatgggtccgttccatcatcaaacaggacatagacataagcatcgccgaacatcgaaaagccgcgcacggttttcgctcccggcaccgacagcatggtggtggtcagcgggtaggtcacctgatcttcgacaatctgcggcgctttccccggatagctcacgcgaatgatcacctgggtatcggagagatccggcagcgcgtccagcggcgcctgctgtaccgaccagacgccccaggcggccataatcagcgtcgccagcaataccagcaggcggttgcgcaatgaccagcggataacggcggcaatcatggctgctccttagcgccgttcagcggcatcattgaggtgactcgcgccccttcatcggtcaggacgaagtgaaacatcaccgactcgccgggccgcatctgttcccgcagctgcggcgtaatagcaaaatccatgatcatcgccggccatttcagcgccggtaccggctggtgcgcaatggttaccgcctcatcgttcacggccttaataacgccctgcgctgagtagctttttgcctcctcttcttgcccggccatttgcggcagcgcgctgcgcaggctggcttcggagtcaatcaggaactgcccggaggtcaccaccttttggcccgcttcgaggccggatttaatctcaaccagaccattctgcgttcgccctgcggtcacctcgaccggacggaaatgcccctcgccgtcggcgatcagcacccgattgctggtgccggtggcaattaatgcctcttccggaatagccagaacggcgctctcctgctgcgcctcagccagctcaacgttcaaatacatgcccggtttgagccgatgctgcggattattcagcactacgcgggctttcaacgtacgggtggtggcttcgaggtcgggaagcagttcgctgacggttccctgaaacgccataccgggccagctgccggtggtggccgtcaccttactgccttcgcgcagcaggctggcctggctttgcgggtaatcaatcacgatccagaccggatcgaggctggccagctcgaacagcggttgggctgtcgtgacctgcgcgccggtgcgcacatccagcttgctgacgtagccatcgtgcggcgcgcgcaccgtcatgcgggtttgcggttgaccgctgcgctcaacgctacggataaccgcttccggcataaactgcagccgcaggcggtcgcgggccgcggcggtcagctcgctatcgcccagccgcctcaccgccagatactcctgctgcgccgccgcccactgcgggatccacagctccgccagcggctcgttctttttcacaaactgctgggaggcgttgacgtaaagtttctcaatcagaccgctggccagcgccggtaccgtttcaacgccccgctcatcaatggccacggtagcaaaagcattgagcttcatcgccagcgtctggcgggagacgttcgccgtacggacgccaaggttttgctgctggcgggcgctaatctgcacgcccccggcgtcttctcccgcgccttcatcggcgtaacgcggcaccagatccatatccataaacggcgatttacccggtttatcaaagcgcgtagcgggggccattggatcgtaccagtacagcactttgcggcccgtttccgcctggccgccgccagcggaggacatcggcgcgcttcgcgaacccagccagtagccgcccgcggcggcaagggcgacggccagcgccacaagggtaagagcagatttaagcttcattatttaacatcctgtggaataaggtagcgaatagcggcccacgcatcggcaagcgctttctccgcattgttgctggcaatttctccgctcaggagatcgcgacgggcggcgagcagctcaggcagcgcggagctgccgccccgatactgggcattgacgagactcaccttcttgcgcagcagcggcatcacctcgctttgctggcgatcgtaaatggctttcgcggcgttatattgcgaaatcagctgatactgctgcgcctgatgttcgcgcatcaataacgtcagccgatcgttggcttcataggtacgggagacgtccgctgcgtggtctttgtcctgacgtttgccctgaaaaataggcatatcgacggtaaacatgacccccaccatgtcgtcataatcatcaccgcgtcgggcgtaataaacctcaacgcccacgtcggggatcgccgcgacttccgactgacctgatttcgctttcgccagatcggcttctctggcggccaggatcacttccgggtgaagtttaatcccggccattaggtcggcttcgtcggcaggcagacgttcaatgcgcggcagcgggccggagatatcgcggacctccttcccggtgagctgcagcaggcgcgcctgggcgatctggacatcgcggcgggcgttatcctgctcatttttcatcgcattcagcgccagctgaacgtccagcacgctgctgggactggcgctggcgctgctgacgccggccttttgtacgtcgatttgccgggacgtttcgctaatcaacgtctgcaccgagcgcagcgacttctgcgccaccgccagcgccagccacgcctgggcggtttcccgctgcagccgggcacgaatcacatcggcattagcggcggtctggcgcgcctcggcggtaatggagtcggctttccgttcacgcttggtactgctgacgtagtcctgcatcacgccaactctttgcatggtcatcccctcgcgggtgaggcggccggcgttattgccgcccagcgggacgttttcaataccaaatttcagcttcggatcggggagctgcatcgcggaatccgccatattcttcaaagcgttaacctgatgatcgttggcggagagctcggcggagtagttttccgccgccgacagggcctcagaaagcgtcgttgcccagccgttggtggacatcagcgacagtaaaagcggcagcccgcaggccgccttattgaagatgtgcataatgactccgaaattatcgcgcggtaattgaaacgatcgcgtagccggagtcggtctggcggaaggtgaaatcgacctgctctcccaccgccagctttttatcgtggttatcagcgagcgcaaagctcatggtcatcgccggccagttcagctcggtaaccggagagtgggcaatcacgacggcatcgtcgcgccaggctttaatgaccccgctggccgaataaagcgtggcggaatcatccgccttcttcatctccggcatatccgccatggaggacatggtgtgatggtgcatcgcggcgtcttccgcgctggcggtaaatgcgctgaaggaaaaggtcagcacgctggtaataagcagaaaaatagaggtcgaacgcataataaagtctccgaaaaaaacataaagtcgcccgcagaccgggcagatctgatggatgtttttaacggtgcgttattccctgaaacggcagaagcgtatctcaaccgggggaccggtgaccggcggcgtgcgccagtccatacgttcagcgcaggtctcctgctgcggggaaaccacgagtagcgcggtttcggaggggagcgcgttcagctgtagagaggttaaggagttaggctgcgcggtatcggggtcgcagtgcttctcacagataactttctggccgacgttttccatgccgggcatgttcatcatgccatcgacaatatggtgaatctgcacctgcggcgccgcgggctgctgctggccgccatggtgcgccgcgacggcgagctgaaggttgagcagtaaccaacaggcaataacaagccctgcgcggatacgaagccggcgccgggttgcttgtttaaataatgcctgtagtgactgaatcatagtgatattcgcaattagacgaccgctggattaaatcacactcactgcaagaattaaacgatatttcaaagagaaaactccaggttaaatagaatgaagtttctctataaatatttacaccaaaaagggatatcagtatttgaccttccccttaggggaaggtgtatagccggcggataatgtatttaataaatagcaaaaatgttatttatatgtaattagcaaaagtgaacgcgattattattccagcaccaacgtatcgccggttgccggcgcgctactctccgctagccaccagcgcccccatgaaccggtgcagtggcaggccatcacctcctcgaccttctgctggcgcaagaattgtctaagctgacgaattgcccacggcggcgcgctgcgcagatgaagaccgccgatgatggcgtatacctgctggatgccggtgatcttctggcagtggcgaacggtattgatcaatccgcgatgtccgcagccgcagataatgactaaccctcgcgtcgagcggcagatcaggacgccttcatcgacaatatagtcctcaccctgggattgacccgtcaggaggccataggcacgcgggtgagcgaccgtaatctcaccggaccacagcagtcgttcgccgatcgccaccggctcgcggctgtactccatgcggtggcgggagtagtcgatatctcgcgacagctttttgactttccagttgcgtcctgcgagagataacgccgagtagcgggtgagtccaatctgcggatgacaaataatacggctgttgtccggcagccacggcaccccgccgcagtgatcgtaatgtccgtgggagagcaccgtggcggtcaggtcagataaagagacgcccatacgctgcgcattatgaagaaacgtgccgtctggcccggtatcaaacagcacccggctggtttcatcctccacaagcaggcttaatccgggtttcgcctgcagcaggctgtcctgccccttgccaagccggttttcgagtaacaccttaatgattaacgccatttaatgaccatcccccctggtttacgacgcctactgtagccaaccgctggcggggatgccgtgatgaaccctgcataaggaaaagtgacggcgtcacaataaagtaacatattgattctgtttagttgccagataagcattgccgtctatgctgatgaacgagtttctcttaaccggagcgcgctatggcagactggaatccttcactttatttgcaattcggcgctgagcgtacgcggcccgccgccgagcttctcgcccgcatcgcccaccgtcccgccacgctggccgttgatctgggctgcggacctggcaacagtaccgctctgctgcgcgatgcctggccagatgccacgattatcggcgttgataattctccggccatgctggaagaggcctcccggcggctaccggactgccggttcgtcgaggcggatatcactacctttcgccccgagcggccggcggacgtgatttatgccaatgcttcgctgcagtggctcacggatcatcagcgccttttcccatatctggtcagcaatcttgcgaaaaacggcgtactggcggtgcaaatgccggtgaactggcaagagccctcgcacgcgctgatgcgtcaggttgctgaagagatggggcatccggccagtgggcggcagccgctgccggatgtgtcggagtattacgatatgctgaccaccagcggctgcgaggtagatatctggcgcaccacctaccatcacccgctggcatcgcaccaggccattattgaatggctacagtcaacgggcctgcgaccgtttttacaaccgcttgatgaacagcagcgccaggcgtttctagaacgctatctggagcggctgaaacagcactatccgttacagtgtaacggaaaggtgctactgcgatttccgcgcctgtttatcgtcgcgcgccgctagcgccatcggagtgtaaaaagagggagagaacgctacggcgcaggaagcaggcgccgtaggccaggtttaccaggacagatgatggaccagagagagatcccatgcggtggccagcagcgaaagaaacatgatgaggttcacaaccgtctctatgcgtttttccattttgttactcctgagtcgtttcccctgttttacaggggaaatcttaataacttcttaatctcagattttcagagcgtcacgcggtaacgaacatagtcatcggcgggcgtaaactcatcatacagacgccgggccggattatcagtacgagtgtgccagtacagccgcgaccaccctttctctttcccttccgcttgcagcgcctgcatcaacgccctggcgatgccttttccgcgcatcggcggggcaacaaacagatcttccagatagcaaacaggcgtctttacccaggtaccttcgtgaaggacacaaatcgcaaatccagcgacgttgccatccgccagggcaacccggcccagcatgggagaagcggaaacaagcatccgctgccaggtatattccgtgacgtcggacggctgcgggctaccgtagaaacgggtatagccttcccatagctgtagccactgcgctttgtcctgctggctcacttcacgaatttcaatgaccatgggtctcatccctcgtttggataagccattattttccagtcagataattagttcaaccgccgggggcacaattcatctttttctcttaattacccctgtttccactgccggacgaaatgggcacaatctttcagacctgcgtttataaaaaaacacagaagtatgttgtaactaatgcgaatgccaaactaacccggcagctgccgggttgagattaatgctccatcgctttagcaatgtgcccggatgagtaccgggcggcggcttacgccttacccggccgacacgatcgacgctattcaggtcgtccgtcagcgggcttcagagtatcagcataatggcttaacggcggcgcgcatgccgtcgcgcagaatagcatccagatcctgcgtgacccgatcgaccagacccggcactttcgtcaggtcctgctcccagtgggattcaacggacagtacggcttttaccagctcaccggtagtgatttgcgcatcccgatgctgggcccatagcgccttatagctctccatccattcggcatcatcctgaaccggatagttctcaccgttacgctcgccgcgataaaaggcgatcagcgccgccagcgcaaaggtcaggcgcgtcgggagagccccctctttcttctggcccgccagcagctgcggcagaatgcgggtacgatatttagtcatgccgtttagcgcgatagacagcagctgatgcttgatgtacgggttacggaaacgaccggttaccgcgctggcgaaggacgccagctcatcgcgcggcagatcgagaaccggaataatctcctgataaatcgccttctcgacgaatgagcagatttccgcatcgttcatcgcttcgcccaccgtatccaggcctgcctggaaggcgaccggcaccagcgcggtgtgcgcgccgttaagaatggccactttacgctctttgtacggtttaatatcgtcaacaatcagcacattaagcggtagcttatcgaggcgcagctcggcggccagggatttcggcccctgaatgacaaacaggtagaaatgttcggcggtatcgaggaaaccgtctttataccccagctgctcttcaatctgcgcggcttcatcgcgcggatagccggtcacaatacggtctaccagggtggagcaaaaagcgttggcttcatccagccatgccacaaacgcttccggcagcgcccactcctgcgcatagcgcagtaccagttcccgcagcgcttcaccgttataatcaatcagctcgcagggaacgatgacccagcctttatccgccgcgccggagaaatggctgtagcgttcaaacagcaggcgggtcagttttgccggatagctcaccgcaggcgcatcctcgaagcggtcccccgcgtggtagctaatacccgcttcggtggtattggaaaacacaaaccgcatatccgggttgtgcgccagccgcagcagttcatcgtaatccgcataggcgctgatttcgcggtttaccgagcgaatcagacgcgcatcgctgaccgcttcccctttctcgttcaggccacgaataatcgtggtgtagaggccatcctgggtgctgagcgacggcgggaatgagctctcaatcggacgcacgatcaccaccccggcattcaggtcggtatgctcgttcagcagatcgatctgccagtcgataaacgcgcgcaggaagttaccttcgccaaactgaatgatacgttcagggtactgcgcgcccgggaaatcgcgacggtttagtgttttcacaagggttccctcatagagtagtcatacaacctgagtaattggtccaataagttatcaggtttttacgcaagtgaaaccctgttttgatcaaagctgtatgcaatataaaatttatgacagaaatttatagaacagcgatgttgccgtcagctcgccgtcgggcatcagcgcatagcgtggaatttccccggctttttcccaaccacactgtacataaaagttttctgctccgctgcccgtcgccgtatccagcaccagaacgctcttaccctgctcgcgcgcgatggcttccagccgggacatgagcgcattcgccagcccctgacgccgcgcattttggtgaaccagaagtttggcgacatcggcgcggtgcggctggttttccggctggtcggtaatcagctgtaccgtaccaacaagccgctgctgcgcatccgctgcggcgagaacaatgcgctcaccggcggcgacgctctgcgccattcgcagccagaacgccgtcgcggtttccggggaaaaaggcagcataaagctcaccgaggccccgccgttgacgcagctgacgaggatgtcggttaattcaggaaggtgttcaagaatatcgtcacgcgacagcgtgcgcagagaaaaggatgtggtcataggtaactccttgaaattgaccacatcactatgtttttaacttatatttaacacaagcggaattaccatcgtcttttcttatgtacgattcagaccatttcttgcgtaaaaatacgattgcgtccggctttttttgcccgaatcatagaatcatcggcgaccatgagcagctggttgaacagatccgttactctggctgaacccggcgcccggctctccagccccatgctgatggtcagctggatcctattttgcccccaggtgaaggtttgcgactcgatgccctggcgaattttttccgccagcagcactccgtctcgcgcggatgaggtcagcgccgcgacggcaaactcttccccaccaatacgcgccaccatgccctcttcacccaccagctgccgcacctgctgcgcaaactgggccagcatacaatcgccgcactcgtggccccagcgatcgttaacctgcttgaagccgtcgatgtcgagcaccatcacggtgagcagctcgttttccgcgatcggctgacgtttcaacgcttcgcttagcccggagcgagaatagacccgggtctggaagtcgaaatcagcgcgcagggccagctgtttgaccaggttattaatcgcctcaacgctggaagcgacgatgatggggctgatcagcatcgcagcaatccccaggcgcgttgagaacagctgccacggctgcatccgggtatcgggggagagatggataagcgagttcgccaccagcagaatttcgctaatcccggtaataaaggtcaacaggcaggttaacggcagcggatagcgaatcgcgcaccaaatcagcgccggtaacgggaaggttatgctcccggccccgcccaccgccacgccgagcacaatcgacagcaccagcgcaatcgccggcaacagctgacgcaggcgaaaacgcccgaacgccgaagggagcgtgagggttaaaatgaacggcaggataagcacggcagtcgaaaactgttcgctaaaccagtccgccagttggggaataaacgtggcgcgttccacatctaccgaacccagcgccccgaccgccgcgcagagcagcgccgccagcagacagtagcaaaacaggcttagcgcatttatcggtcccggcatcgaatcagcccggcgcttatcccacaaaatgagctgcgccagggtgacgataaaaacgatattggagaagttgatcagaaaggaggcgacccccattccccaacgagatgttaaaccgtcatataccagcatggcggcaaaacaaacggcgtaaaaatagctgcgatttagccagatataacgcgcaaaaatccccgccattaccgcgttcagcggccagaagaacgacaattcttgtaccagacgcagcatcgcgccaaagaaatgcagtagtagcgttaaagtgaacaacaccagcgcatcacgcacgggctgttcctcacgaaacagcgtgaatgaccgaatcgacagtggagacattcatgattatccgtctaattgtttcaggcaattattatgttaataattagtaagcggttcatcatatcatgagaataattatcaggcatataccgccgcccgatgaattacagtctgctgcggtccggcgaattcatctggatcaccagccagtggtgaatcacctgcaccacgtagcgctgctcttcgtcgctgaggccgcgcccccgcgggatcgcgtgccacttttccagacagccgcgacagcaggtcgcggtggcatgctgggcgataaacaccggatgtccgcgcatcggggtctgcttaccgtcgttaggaatttgcgcaggggccagccgactggcgataaagtccgccgtgtgctggtcgataacctccgcgcccttatcataacaatactgccgttctttcacgccgaggcgaaaacgggagcgaaaagtggagcgctgcaggcgggcaaacaggttttctatgggcaccatcagaataccgacctccccagtttttgagtgagtttttccagtaaagcgatcccggccagcgagttcccggcgtcatcgagctccgggctccagaccgcaatcgccatctcctgcggaacgatggccacaatcccgccgccgacgccggatttcgccggtaaaccgacgcgccacgcaaattcaccggcgttctgatacatgccgctggtcatcatcagcgcgttgacctgccgcgactgaatgggggcgataaccggcgtctcaaggtgcggagcgatacctcggtcggcaagaaacagaaaggtgcgcgccagctctacgcagctcatctccagcgaacagtagtggaaatagttttgcagcaccgtggcgacatcgttatggaaattaccgaaggatttcatcagccaggctatcgcggcattgcgcgccgagtggtcgaactccgaacgggcaaccaccgggtcataggcgatatcgcccacaccgctcagacgacgcacgatttccagcatccgctgacgaggcgcgctgagacgactttgcagcatatcgcagaccaccagcgccccggcattaataaacgggttgcgcggtttgccttgttcaatttccagctgcaacagcgagttgaaaggctggccggagggatctttacccacccgctgccagatctcctcttcctgatagtggttcatcgcgaccaccaggctcaggactttcgagatagattggatagagaagcgctcgtgcgcgtcgccggcgctgtagtgctgaccgtcgaccgtacagatagccacgccgagcttatcgccgctgacgctggccagcgccggaatatagtccgccactttaccgcgaccaattagcggcctgacttcagccaaaatggcatcgagcattgcgttattcattaccgtcgccacgcgcggctccttgccaacaacaaaattcgggcggtaattataggcgcacgggacgcgaagaaacagcctctttctcgccctcgcgtcgccagggggatggttcgctcgtcagcggggcgcctgcccgggctaccaaacccgcaaatcgcacgaatcggtagcccgggaaaggcgttagccgcaacccggggatttttccgcaggctagcggcgatctctccagacggtctgcacgttgcagaattcatgcagaccaaaatgggagagctcgcggccaaatccgcttttcttcacgccgccgaacgccacgcgggcatcgctggcacagtagccgttgataaacactccgccgcactccagctcatcggcaaaacgctgggcctgcgcttcactggtggtgtaaactgttgctgaaaggccaaattcgctatcattagccagcgccagcgcgtgatcggcatcgcgggcttcggtaatcgtcgccaccgggccaaacagctcctcgcggaaaccggtcatctccgcggtaacgtttccgagcaccgtcggcgcgtagtagttgccggcgccttcgattttttccgcccccagcagcagggtcgccccctcttttaaggtcgcgcgcacctgctcgtgcagctcatcgcgcagatcgaaccgcgccatcggcccaatatagttctgctcatcgcgcgggtcgcccattttcagcgcggcagcggcggcgacaaatttctgcgtaaaggcctcggcgatgcccgcttcgacgataaaacgcttcgccgcggcgcagacctgaccggtattctggtagcgacctatcaccgccgctttcaccgcctcgtcaaggtcggcatctttaagcacgataaagggatcggagccgcccagctccagcacgcattttttcaacgccgcgccggcctgtgcgccaatggccttcccggcgcgcacgctgccggtgacggttaccgcggcgatgcgcggatcgttaatcatttgcgaaacgccatcgttggtggcgttcacccagccaaagacgccgtccggcacgcccgcagcggcaaaaatttcgccgatcatcgccgcgctgcccagcacgtttggcgcatgcttaagcagatagctgttgcccgccagcagaatgggcaccgcgccgcgcagcacctgccacaccgggaagttccacggcatgacagcgaggatagcccccatcgggcggtactcaatcaccgctttattgtcttcaaccagcgtcgcctcggtattgagcatcgccgggccgtgttcagcataccagtcacaaagattggcggatttagccacttcgccgcgcgcctgggcaatcggtttacccatttcgcggctaatcatttgcgccagcgcttcgccacgggcgcgcatcgcgctaccgacgttacgcagcgtcgcagcgcgctccgccacgctgacgttgcgccactgacgatacccctgttccgcaagggcaatggccgcatcgacctgctgttcgctggcccagggcacagacgacaaagtttcaccggtggtcggactcacggaaatcgcatgagtagcagataaattcatcgtttttctctctgtgttgattgcgaagtgaccttatactgtcttacccttcctttcattaaaaatgaataatattaagcaacccattcacaaaagaagaacaatatggatctgacccagcttgagatgttcaacgccgtcgccagcaccggcagcattacccaggccgcgcagaaggtgcatcgcgtgccgtcaaacctgaccacacgcatccgccagctggaggcggatctcggcgtcgaactgtttattcgcgaaaatcagcggctgcggttatcccccgccgggcacagctttttacgctatagccagcagatcctcgcccttgttgatgaagcgaggatggtggtcgccggagatgaacctcaggggctgttttcgctcggctcgctggagagtaccgccgccgtgcgcatttcccctactctggcgcactttaatcagcgctatcccaagattcacctggccctctccaccggtccttccggcaccatgatcgacggcgtacttgagggaaatctgagcgcggcgttcgttgacggtccgctggtgcacccggggctggaagggttaccggtgttcccggaagagatgatgatcgtcgcgccctttggccacccgcccattgcccgcgccagcgaagtgaacggcgccagcgtctacgcgtttcgcgccaactgctcctatcgccgtcattttgagagctggttccacgccgatcgcgccaccccggggcggatccatgagatggagtcctaccacgggatgctggcctgcgtcattgccggcgccggactggcgctgatgccgcgcagcatgctggagagtatgccgggccatcagcaggtatccgcctggccgctggccgaagagtggcgctggctgacaacctggctggtctggcggcgcggggcgaaaactcgccagctcgaggcgtttatagcgctgctgaacgaagatcgacaagcagcagcttctccataaaaatgcttaacggatccggctgatacggcgcaaaggcgctgcgggtctggtagccattgcgcgtgtataacgcgacggcggcgtgctgatggatgcccgtttcaaggcgtacggtatggcattcgcgatttatcgcctctttctccagcgccgccagcagtttttcccccagctgctggccgcgatgggccgggtgaataaacacccttttcatctcgccaatcccctcttcgccgagcacgatggccccacagccgacggcccggtgctgcccatcgcggataatgagcgcgatgaccgacgccgccggtaacgcgctcaggtcgataagatgattgctttccgccgggtagagcgtctgctggtatgcgtccagctcggcaattaaggcggtcagatccgggtggtttagcggggtcgcggcgatagtgtacataaagaagctccttttttgagcgtactgtagcgcggggcgtccgcggagccgccatagcattaacttatagcttctgacccgacttgcgctcccccggtgagaggcagtaattttgcgacataacctcttttatcaggaaaatacgatgaataccaaagcgcgcaaggtgatgattatcggggccggaaacgtcggcgcatcagcggcctacgccctgttaaaccagaatatttgcgaggagctgatccttgtcgatctcaatacctctcgcgccgaagcgcacgctcaggacctgagcgacgcggccgcctacatgccgggcatgatgaccatttccacccgggaagccagcgactgcgccgatgtcgatatcgcggtcatcaccgtttccggcggcgcgctcaagccgggtcaaacccggctggacgaactgaccaacacggcaaaaatcgtcaaaagcatcgtcccgcagatgatgcgcggcggcttcaacggcatctttttggttgccaccaacccctgcgacatcatcacctggcaggtgtggcagctttcgggcctgccgcgcggccaggtgctgggtaccggcgtctggctggacacgacgcgcttacgccgggtactggcccaggcgctggatatcggcgcgcaaagcatcgacgcctttattcttggcgagcatggcgatacccagtttccggtgtggtcacactcggcggtttacggctccgccatcgccgatgtttaccaaaaacataccggccaggctctcgaccgggagctgattgccgaaaaggtgcgcaagctggggtttgagatttacgccggcaaaggctgcacggagtacggcgtcgccggaaccatcgccgaaatctgccgcaatattttcaccggcagccatcgcgcgctggcggtgtcgtgcattcttgacggggaatatggcgtaaccggcgcggcggctggcgttcccgcggtgctgacgcaaagcggcgtgcagcagattattgagctgcagctggccgatgatgaagcggagaaattccgccactctatcgaagtgattaaagccaatatcgcccgtctaccgtgatggcctatttttcctgcaggttacgcaggaatagcgcgcaggataagtttgccgggtaacccactcggattcgggatcggcgggtctgttgccgatcccgttttatgatgaagggcgagctagcgtagcgtgatgacgccatttaaataggtcaccgcctggccgctcatcaatacgcgttttcctttcagttcgcagcgcatatcgccgccgcgcgcggaaacctgacgcgccagcagctgagttttaccccgctttgcgctccagtaggggatcagcatagtatgcgccgaaccggttaccggatcttcccacaccgcttcaccgggtgagaaaaagcggctaacgaagtcatattccccgctgcccgcggcggtcacggtcactttatgttcgccgggcgtcatcgcagcaatattcggccgcagggcttcgacctgctcacgggaggccagttcgataagccatgcgcgccccttgcgggcatgcaggtagcgctcaatccccagcgcggagagcatctccgcgggcggctcgcgctcttccgtttctcccgccgggaagtccagggtcagccagtcgccctcgcggctcacggtcagccgaccggaagcggtcgcgaagtgaatgaccgcgtcaggataatccaggtgatgaaatatcacgtgcgcgctggcaagcgtggcgtggccgcagagattgacctcattgcgggtggtaaaccagcgcagcgcaaaaccatcgctctcaggtaccacaaacgcggtttccgactggttgtgctgctgcgccattttgagcagcagctcatccggcagccactttttaagcaggcataccgcagccgggttgccggcgaaaggctggtcgctgaacgccgccaccagataaaaaggaatttccgtcaccgtccctccttaacgaagcgtaatcgtgccgattaagtaggtggtcgcctgaccgccgatcagaacccggtcgccccgccactggcagcgcaggtcgccgccgcgggccgacacctgccgcgcctgcatgtccgttttgccgagcttctcgccccagtagggaatcagcatactgtgcgccgagccggtgaccgggtcttccgccaccgcctcgcccggacagaagaaacggctgacaaagtcatactcttcgtccggggcgctgatacagatcattttgccgaggcgctcaagcagctgcatatccggacgcaccgcctccacctgctggcggtcggctaaaaccaccaggtaatcacgcgccacgcggacttccaccgcgtcgctcagccccagcccggccagcagctccgcaggcggctgctcaacggcggtcgtcgcccaggccgggaaatccagggtcagccagtcgccgctgcgcgtgacgcgaagctcgccgacaaagcgggtactaaatacgattgtcgatgaggggtggtcaaaatattcaaaaatgacgtgcgaggccgccagggtcgcgtggccgcagaggttgatctcatccagcgtggtaaaccaacgcagctcaaacccctcatccgtacgcacaaaaaacgcggtctccgactgattgtgctgctgcgccattttcaacagcgtttcgtccggcagccattcggtcagcgggcaaacggccgccgcgttgccgccaaagctccgatcgctgaaggcatccaccagataaaagctaatttcctgcattgttctgtccctctatttttttacttatcgataacatgacataaacgtgagaaatccacacgtttaatagaaaaattaatccgttagtgccgaaaatctggctgaagcgaaaatgagatgtagatcacaaaatgattgtattttcagcagcaatcgttttaagatcgtcccacttctttcctctttgtaaccagccctgaacttatgatgacaaatacggtttcacgcaaggtcgcgtggctgcgcgtagtcacgcttgcgattgcggcatttatctttaataccaccgaatttgcgcccgtgggcctgctgtcggatatcgccgacagctttggcatggaaacggcgcaggttgggattatgctgacgatctacgcctgggttgtcgccctgatgtcgctgccctttatgctgctgaccagcaagatggagcgccgtcgcctgctggttggcctgtttatcctgtttatcgccagccacgtgctgtcgttcctggcctggaacttcaacgtgctggtgatcagccgtatcggtatcgcctttgcccacgcggtgttctggtcaatcacctcggcgctggctatacgaatggcgcctgcgggtaaacgcgcccaggcgctgagcctgattgccaccggtaccgcgctggcaatggtcttcggtatcccgattggccgtatcgtcgggcaatactttggctggcgcaccacgttcctggtcatcggcctcggggcgctggttaccatggtttgcctgatcaagctgctgcctaagctgccgagcgagcactcagggtcgctgaaaagcctgccggtgctgttccgtcgccctgcgctgctgagcatctatttgctgacggtgattgtggtgaccgcgcactataccgcctacagctacattgaaccgtttgttcagacggtcgccggcctgagcggcaacttcgctaccgtgctgctgttgaccctgggcggcgcgggcatcgtcggcagcatcctctttggtaagctcggcaacctgcatgcgtccgggttaattaacgcggcgattggcctgctgctggcgtgcctgctgctgctgctgcccgcctcgcacaacgccaaccacctgatgctgctgagcgtcttctggggcgtggcgatcatgattatcggtctcggtatgcaggtcaaagtgctggcgctggcgccggacgcgaccgacgtggcgatgtcgttattttcggggatctttaatatcggcatcggcgcgggcgcgctggtgggcagccaggtcagtacccatctgtcaatggcgtccattggctatgtcggggcgatccctgcggtcgtcgcgttagtgtgggcggtgatgattttccgccgctggccggtgtcgctggaagatcagcagccgcatcactcctgatcgtgctgctaaaaaaactgccggtcgtgagatcggcaggtttttttacgtctggtatcaggacggcgatgaccgtcaggcgtgataagtggaaataatctccagcacgccgttaataataaactgcacgcccatacagaccagcaggaagcccatcaggcgggaaatcgcctcaatgccgcccttcccgaccagacgcatgattgccccggagctgcggagacagccccacaggataatcccgaccagggcaaaaataatcggcggcgcgaccagaacaacccagtccgggaagctcgccccgtgctttaccgtagacgctgagctgataatcatcgcgattgtccccggccctgcggtgcttggcatcgccagcggaacgaaggcgatattcgccgtcggttcatcctcgagctcttccgatttcagcttagcttccatcgagtcatgggctttttgctggggaaagagcatgcggaagccgataaaggcgacgatcaggccgccggcaatacgcagaccgggaatcgatattccgaaggtgttcatcaccacctggccggcataccaggcgaccatcaggatggcgaacacataaaccgaggccatcagcgactgacggttacgctcggcgttattcatattcccggccaggccaaggaacagcgccacggtagtcagcgggttcgccagcggtagaatcactaccagtcccaggcctatcgctttaaaaagatccatcatagtgaattaaggtcctgtcaatattggattatcaaaaaaatgacgcgtgctgagtatatcgtctgttgccagattgtacccgttctcctcaggacgcattcacccttccttcaaatcataagataacaacgtgaaatagagtgacctgcctcacaacaattcgttttagcaaatcgtggcatcgggtaattcatcaggttgacttatatttgcctaggcaataatatctcccgcaactaagtcattgcctgggcaaccattgtgaaaagtacaagcgacctgtttaacgaaatgatccctcttggccgcttgatccagatggttaaccagaaaaaagatcgcctgctcaacgactatctctcgccgatggatattacttccacccagttccgggtgctctgttccattcgttgcgaagtgtgtattacccccgttgagctgaaaaccgtgctttcggtcgacccaggcgcaatgacgcgcatgctcgaccgcctggtctgtaaaggctggattgaacggttacccaacccgactgacaagcgtggcgtgctggtacagttaacgccagacggcgcagccctttgtgagcaatgtcatcaggttgtgggtcagaaattgcaccaggaactaacaaaaaatctgtcgacggatgaagtggccactcttgagtgtttactcaaaaaagttctgtcgtaataagaagaggtaagatgatgtccagacgcaataacgacgccatcactatccatagtattttgtcgtggatcgaggataacctggaatcgcccctgtcgctggagaaggtttcagagcgctcaggttactccaagtggcacctgcaaagaatgttcaagaaagagaccggtcactcgctgggacagtatatccgcagccgtaagctgaccgagatcgcgcagaagctgaagcagagcaacgagcctatcttatacctggccgaacgctatggttttgaatcgcagcaaacgctgacgcgaacttttaagaactatttcgatgttccgccgcaccagtatcgtattaccaacgtgccgggcgagtcgcgctacctgctcccattaaataactgttgttaaccgcctgcaaaaagacgtattgaggaaatcatgaaactattcgcttccgccgccatcgtgctattggcgctggtctcgagccaaagttatgcggagcaaaccagcaccccggttcgccacaacaaccgggatgcgatgattattccttccgaacataatgattcgccttttgatttcaatcacatggcctctggcagtgataaatcagatgaacttggcgtgccctattacaaccagcaaagcctgtaaaatccctttagccccgtgaccggggctttttttaccctcgcgccatgcccggacgcacgatccgcaggccaaatacgttgatatacagcccggccataatcagtaccgcgcccagcagctgcaggctattcagcgtctcgccgagcaataaggccgcgctggccatcccgaccaccggcaccagcagcgacagcggcgccacgcgccaggtttcatagcggccgagcagcgccccccaaataccatagccgacgatggtggcaataaacgccagatagagcagcgacaggatcgtcagcaggtcgatatgcagcaggctttccgccatgacctgcgggccgtcgaggatccacgacgccagcataaacggcagcaccgggatcagcgcgctccataccaccaaagacataatcggcggccggctcgcatgcgacataattttcttgttgaagatattgccgcaggcccagctcagcgccgcggccagcgtcagcataaagcccaccagcgggacatgctggccgccgaggctggcttcgaccagcaccagtacgccgaaaatcgccagcgcgatccccgccagctgtttcccctgtaaacgttcgccgaaaataaacgccccgagaatgatggtgaaaaaggcctgcgcctgcagcaccagcgatgccagtccggcaggcatgccgaggctaatcgcgcagaacaaaaacgcaaactgaccgaagctaatcgtcaggccgtagcccagcagcaggctcagcggaatttttggccgcgcgacgaagagcagcgccgggaaagccaccagcaaaaagcgcagtccggcgagcatcagcggcggcatattatgcagccccaccttgatcaccacgaaattcagcccccataccaccaccaccagcaatgccagcagcccgtctttacgcgtcatacccgcctcggttgttattggaatttttgcgaacaaaatcaaactaccgaataattcgtccgccgcatagatcattattttcggtagggcgctggcgtgcttttcatcacccccgggaactatacaagccccggttagcgtgctatttgtgatcgtgacaacaaaaataacatcacatcaggcaaggaaaaaatgataccgactctcaggcgctcaaccgcagcgctgctggcttcgtcgttgctgttaaccattggccgcggcgcaacgttaccttttatgacgatctacctcacccgccagtaccagctggaggtggataaaatcggctatgcgctgtcgagcgcgctgatcgtcggggtgctgttcagcatgggttttggcattctcgccgataagttcgaaaaaaagcgctatatgacgctcgccgtgctggcgtttattggcggctttatcgctattcctctggtcaatagcgtcgcgctggtggtgtttttcttcgcgctgattaactgcgcctactccgtcttctcaaccgtgctgaaagcgtggtttgccgacgtgctgtcgccggaaaagaaggcgcagattttttcccttaactatacctttctcaatattggctggaccgttgggccgcctatcggcactctgctggtcatgcacagtattaacctgccgttctggctggcagccggctgcgccgcccttccgctggtatttattcagctgttcgtgcagcgcaccagcgccgcgattgctcaggataacgcggtccagtggtcgccgtcggtgctgctgcgcgatcgcgctctgctgtggtttaccctttccggcctgctggcctcctttgtcggcggctctttcgcttcctgcatttcccagtatgtgctggtggtagcggacagcgattttgccgaaaaagtggttgcggtggtactgccggttaacgcggccgtggtggtggcgctgcagtatgcggttggtcgtcgccttaccgcccgcaatattcgcccgctgatgacctttggaacggtctgttttgtgctcgggctgggcggttttgttatttccgataacagcctgctgctgtggggcgtctccgccgccatttttacgctcggagaggttatctacgcgccgggggaatatatgctgatcgataacattgcgccgccgggcatgaaagccagctacttttccgcccagtcgctgggctggctgggggcggcgtttaacccgatgctgaccggaacgattctgacccatctgccgcactggtcgctgtttgtgatattgatgctggcgattatcgccgcatggctgatgattttccgcggcatgaacgttcgtccgtggaacggtagcgcggtcgcccgcgcctgatgccgggcgccgtgcggctgtcaggttgctgtcgcgtccctgtcgggtttcgatcgtggtgcccgacagcccgctcgatgatactccatctcaggttttcacccggagatagaaacaatgaacagtagtcatcaggttaaacaattacgtttgcagcgcgcctggtcgcaggagcagcttgccgaactggccggcgtcagcgtgcgcaccattcagcgcatcgagaacggcgaccgtcccggcctcgagacgctcagcgcgcttgcggcggtatttgaagttaacgtcgccgagattagcggcgaatcgccggcgggccacgaagcgtcgctggatttacgtattgaggaagccaaagcgcgcgtcgaacgcgagagccgtttttaccgttcattgacggtggccgtcgtcgtttgcgttctgctggcgctgctgaactggctgagcggcgcagagagctactggtccgcatgggtggcgatcgtctggggagcgctgctggtggttaaagggttgcgcctgtttgtttttggcgaatggattaatcgctggcgtcaggcgcgcctgcagcggctgctgcgcaaatagccctctgcgcgcttttcccgagggcggcgcaagcgccttgcccgggctacgggttcatcgccgtctgcgagcggtagcccggacagatgcgcagcatcgcctccgggaaatcatatccaatgcgccctgtggcgagctccccgggggcggcgcaaagcgccttgcccgggctacgggtccatcgccgtctgcgagcggtagcccggacagatgcgcagcatcgcctccgggaaatcatatccaatgcgccctgtggcgaactccccgggggcggcgcaaagcgccttgcccgggctacgggttcatcgccgtctgcgagcggtagcccggataaggcgtcagccgccatccgggagccatatccaatgcggcctgtggtgagctccccggggcggcgcaagcgccttgcccgggctacgggccagcagactgctgtatacctgtagcccggctaagcgcagcgcgagccggggggaggccgccatccggggcgagttaaatggtgaccatcccgcggacgccttcggcttccatatcgccgccgttgccctgctggataatcgcgccgcgcgacatcaccagatagcgatccgccagaccggcggcaaaatcatagaactgctcgaccagcagaatcgccatatccccgcggttcgccagctgacgaatcacctcgccaatctccttaatcaccgacggctgaatgccctccgtcggttcatcaagaatcaacagctgcggacggctggccaacgcgcggccaatggccaactgctgctgttgcccgccggaaagatcgcccccgcgccgctgcttcatggttttcagcaccggaaacagctgataaatctcttccggcaccgcgcgcgcgtcgcgggcgggaaagcgggacagccccatcagcagattctcctccaccgtcaggcgcggaaaaatctcccgcccctggggcacgtaggcgatccccgactgcacccgctggtgcggtttacggtgggtgatattcttctcctgccacagcacctcgccgctgcgcgccgggatcagccccatcaggcacttcagcaaggtggtttttcccaccccgttgcgcccgagcaggcaggtgatctcgccctggcgagcggcaaaatccactccacgcaggatatggctgccgccataatattgatgtagttgattaacctgtaacatccgcgctccttagcgtccgagataaacttcaatcacctgttcgttggcctgcacctcgcgcagcgacccttccgccagcacctgtccctgatgcagcaccgtcaccctgtcggcgatggtctcgacaaagcccatatcatgctcgaccaccatcagcgaatgctgcccggcaagggtgcggaacagctcggcggtatattctgtctccgcatcggtcatcccggcggcgggttcgtccagcagcagcagatgcggctcctgtaccagcagcatgccgatttccagaaactgcttttgcccgtgcgacagcagccccgccggccgatagcgttcgccctccagccgcagcaggcggagggtttcgctgattcggtcggcctgctcgctgttcaggcgcgcccgcaggctggcccacaccgatttatcacctttcattgccagttcgagattctctgccaccgtcagcgcctcaaagaccgtcggtttctgaaacttgcgcccgatgccctggcgggcgatggcgatgggatcgaggattgttaagtccaccgactgatcgtaaagcgccctgccgctctgcggccgggttttgccggtgatgacgtccatcagggtggttttaccggcgccgttcggcccaatcacgcagcgtagctcgcccacgccaatctgcagcgacaggttggtcaacgcctgaaaaccgtcaaagttgacgttaatctcttccagctgcagtaccggatcggtctgctcgcgaaagcggtccgtcggcagctggcgggtaaatagctcttcatccaatggcatcagcgatctcctttacgcagcaggccgataacgccacgcggtaaaaacagcgtcacgataataaaaatcagccccagaaagagctgccagtactccggcatcgccacggtaaagtagcttttcgcgccgttgaccagccccgcgccgagcaccgggccgattaaggttccgcgaccgccgagcgccacccagatggccgcttcgatagagttggtcggcgacatttcgctggggttgatgatcccgacctgcggcacgtacagcgcccccgccaggccgcacagtacggctgaaagggtccataccagcagcttaaagccgcgcgggtcgtagccgcagaacatcaggcggttttcagcatcgcgcaccgccgtcagcacgcggccaaatttgctttgcgccagcaaatagccaatccacagggtgagcaacagcagcagtaccgtggccataaacagcgccgcccgcgtgctgatggcggtgacggagaaaccgagcagcgtggtaaagccggtaaaaccgttgttaccgccaaagccggtttcgttacggaaaaacagcagcatcccggcgtaggtgagcgcctgggtcataatcgaaaaatagacgcctttgattttcgagcggaaggcaaaccagccgaaaaccagcgccagcaggccgggcaccagcaccaccagtagcatagcccaggcgaaatgctgggtgccccaccagaaccacggcagctcgctccacgacaaaaacgacataaaggccggcaatccgtcgcccgccgcctggcgcatcaggtacatgcccatggcgtagccgccgagggcaaaaaagatcccatggccaagcgagagcatcccggcatagccccagaccaaatccagcgccacggcgacaatggcgtagcagaggatcttgccggtcagcgtcagcagccaggtggagaccgccagcggatgcgtggcgggcagcagcgccagaaacggcatactcagcaggcccagcagtagcagcacgccgaaccagcgcagcgggcgcggcgctttgcgcgccagcgttaaggtaataggttggctcatcagtcaataaccctccctttgagggcgaacagtccctggggacgtttctggataaacaggataatcaagaccagaatcaggatcttacccagcacggctcccatctgcggttcaaggattttgttaaagatgccaagaccaaacgccgccgccacgctgcccgccagctgaccaacgccgccgagcaccaccacgaggaaggagtcgataatgtagccctggcccagctcgggcccgacgttaccgagctgcgacagcgcgacgccgcccagccccgcgatccccgaaccgaggccaaacgccagcatatcgacccgtccggtcggcacgccgcagcaggccgccatcgcgcggttttgcgttaccgcccgcacgttcatccctagccgggtcttgttcagcgtcagccaggtaaacagcagcaccagcagcacgaaaaccagtaccgccagacggttccacggcaggatgagattcggcagaacctgcacgccgccggagagccatgccggattggcgacctcaacgttctgcgcgccaaatagcatccgtaccagctggatcagcatcaggctgatcccccatgtggcgagcagcgtctcaagcgggcgcccgtacagatgacggatcacggtgcgttccagcgccataccgataccgccggtgatcaggaacgccaccggcagcgcaatcagcggatagaaggccagccactgcggcgccagctgcgccagcgcctgctgaaccagccagcagctgtaggcgccaatcatcagcatctcgccgtgggccatattgatcaccccgagcagaccgtaggtgatggccagaccgagcgcggcgagcagcaggacagaaccgagggagaggcccataaaagcctggccgagaagatcgcccagcagcaggcggtgctggattttactcaggctctcctgggccgccgcgcgaatcgccgggtccggctcatgccgggcatcggtatacggcgtcagcagcgcctgagtttccgggtcaccggagtggccgagcagctcgatggccgccagccgctgtgcgggctgaggactgacaagctgtaaacgggccagcgcaatttccagctgcgacttcaccgcgccgtcggtttccgccgtcagacgctgctgtagcagccccgccatctcaggcgtcgcttcgcgctgcagggttttcgccgccgcggccctttccgtgacgttgtcactaaccaggagatgcgtcgccagcgcgcctgccgccaggttacgcaggcgattggtcaggcgcaccggttttgttgggccgacgggcgccggaaccgcgcccagcgccagcaggctgtcgccctgtttgctgaacgcatgaccgccgctatcggattgcaatgtttcacttttcagcgcccgcagcagcggtaaacgcggcgcttcgggcgcggcggcccactgttccagcagctgagcctgctggctgcgattggccgccacaaaatcgtcggcgtccgctgcctgcgcccgccacggtatcaagaccatcagcagcgcgaagtaacacatgaggcgtaatgcgttcatggtcgttctccttttcggggaaatccgggcttcgggcccggaagactgaatcattcaccccggcgcggcgccggggtctaacgcttagttgctgacggttttaaccgggtgatccggctttttatcattcccggcaatccacgggctccacggctgggcgcgtaccggctcttcggtctgccagaccacgttaaactggccgttgctttcgatttcgccaatcattaccggcttgtgcaggtgatggttggtggcatccatggtcagggtaaagcctgacggcgccttgaaggtttggccggccatggcatcacgcaccttgtcgacatcggtcgatcctgctttcgtcaccgcctgcgcccacatgtgcaggccaacccaggtcgcttccatcgggtcattggttaccacggtatcggcgtttggcagcttgtgggctttggcgtaagcgcgatagtcggcaacaaactgtttgttggttgggttatcgacggactcgaagtagttccacgccgcgaggttgcccaccagcggtttagtatcaatcccgcgcagctcctcctcgcccacggaaaaggctaccaccggcacgtccgtcgccttcagcccctgattagccagctctttatagaacggaacgttggaatcaccgttgatggtagagaccaccgcggttttaccgccggcggagaacttcttgatattggcgacgatagtctgatagtcgctatagccgaacggggtatagacctcttcgatgtctttatcctgaatgcctttggcgtgcaggaaagcgcggagaattttgttggtggtgcgcgggtagacgtagtcggtaccgagcaggaagaagcgtttcgccccgccgccgtcttcgctcagcaggtattccaccgccggaatcgcctgctggtttggtgccgccccggtgtagaagacgttcggcgacatctcttcgccttcatactgtaccgggtagaagagcaaaccgttcagctcttcaaataccggcagaaccgatttgcgcgatacggaggtccagcagccgaacaccgccgccaccttatcctgcgtcagcagttgacgcgctttttcggcgaacagcggccagtttgatgccggatccaccactaccggttccagttttttacccagtacgccgcctttggcgttgatgtcatcgatagccatcagggcgacatctttcagcggggtttcagaaatcgccatcgtcccggaaagcgagtgcataatgccgactttaatggtgtcggcggcataaacctgtaaggagaagcccatgctaataacagaggcggagagagcaaaagcttttaatagtgttcgacgctgcatgtgtgtcactcctgaatagcgcaaaaacaaaaaaatgaattaacgactcaccggaagtgataaggcaaaaacgatgccaggttgtgaaagcgtctgaaagcgcggcagaatacggggaaaataaaggtgggtgcacagcgttgccttaaaatagtgcaacgctgcgctatggagagattaccagacctgcgcggcgatgccggtgaccaggcggactttatcccactgctgggcttcggtcagagagttaccctcttcggtggaagcaaaaccgcactgcgggctgaggcaaatttgcgccagcgggacgtactgcgccgcctcctgcagacgagccttcaccccttccgggttttccagctccccgtttttagtggtgatcaggcccagtaccacctgctgatggccggggcgaatgtagcgcagcggcgcgaagtcgccggaacggtcattgtcatattcgaggaagaacgcgtcgatgttaacgccgccgaacagcacttccgcaaccggctcgtagccgccttcggagatccaggtcgagcggaagttaccgcgacacacgtgcaggccaacggtcagatcctccggcttcccttccagggccttattcagaacgcgggcataaatgcgcgccagctcatccgggtcttcgccgcgctcgcgcacctgctgtcgctgctcatcggagcagaggtaggcccagacggtgtcatcaagctgtaaatatcggcagcccgcatcgtagaaggcgcgaatggcatcgcgccaggtggttgccaggtcatcgaaatagtcggcgagatccggatacaccgtcgcgtcgatatctttccggccgccgcggaagtgcagcacgctcgggctgggaatggtcatcttcggctgagcgctgccgctgatgctcttcagatagcgaaaatcttccagcatcgggtgatcgccaaaggccagtttaccggtgacgcgaacgccgtgcgctttggtctgtaccccgttgaactgaatgcccttttctgaatcgtagcgctcaacgccctgtagtccgtcaaagaaatcaaagtgccaccacgcgcggcggaactcaccgtcggtgaccacatgcagcccgcactcgcactgctgctgcaccagaacgcgaatcgcctcattttctatctgccgcagctgctgcgcgtcgatggtgcctgcggccagctgctgacgggcctgtttgatggcgtccggacgtaaaaagctgccgacaatatctgcgcggaacggggcctgatgacgttgcatggtgtctccttagcggcgggcaaagttaattacccaccgtgatagttcattatttgaatttatagacttctggatggctatatgtccagatactggcatgcagaggtttcatcggcaaacgacaatatttcatggcacatgaaataaattcactttgcgaaaggcaacccttcatcttcccagccggtcaggccgccgagcatcatttttaccgggcgccccagcagagccagcttcatggcggcgacgtccgccccgttgcagtgcggcccggcgcagtagaccacaaacagcgtgtcatcaggccactgcgccattctggtttcatcaatttgtcggtgcggtaaatgcagggcgcccgggagatgacgacgggcaaaggtttcctcactgccgacgacgtgcagcagaacaaaatccacttctccttcgcgcatcgcgctgtagacatcggcgcagtcggtctcgaggcttagcttatgacgaaaccaggcggcggcgtcggtagaactggcgggggcaatagcggttacaacactcatggcatcttctccttgtctgtgataccactactttaattaaccgcctgcgcgacatctgccgagaaccatgactgaaaacgctgaaatcctgacaatcccatccgtgacgttgtcatgccaccgggttgttgccctcgcctacgatggcctgtgtacctttgaatttggcgtcgccgtagagatcttcggcctgccgcgcccggagatgggcgaacgatggtatcgctttgccgtagccgccgtcgacgacggtgagctgcgggcaaccggcggaattcggctcatgaccgacggcggtatggcgctgttaggcgaagcggacaccatcgtggtgcccggctggcgcggtattaactcccccgtgccgccagcgctgtgcgaggcgctggtcgccgcccatgcgcgaggctgccggataatttctatctgctccggggttttcgttctggccgcggccgggctgctgaacggccgccaggcgaccacccactggcgctataccgaccagctgcgggcgcggtttccgcgcattgaggtgatcgatgacgtgctgtacgtcggcgccgaaggcgtcatgacctccgcaggcagcgccgcgggtatcgatttatgtttgcacctggtgcgcgaggactttggcgtcgaagcggcgaatcttgtcgcccgacggttagtggtttccccccatcgcgacggcgggcaggcgcagcagattgttcgcccggtggccaaagcgcgggagagccagcggctggggcaattatttgatttcctgcaccagaatctcgccgctggccacaccgtggcctcgctggcggaaagaaccggcatggggcagcgcacgtttttacgccgtttcgaagacgctaccggcaaaacccccgcccgctggctgcttgacgagcgccttcagcgcgccacgcagcacttagcccacagccggctgagcgttgagcagattgccgagctttgcggtttctcaaacgccagcaccctgcgccatcacttccgccagcagtttgcccttagcccgttgcagtacaggaaaagcgcgctggcgggtaaaaagggggagtgattcacatggataatagtcacgccgggcaatttgttaagcgtttgtttagattagtcgggttaagatgtatccaacaaccgtaaacccgttcaatgaggacaacatagcgcatagcaaaactaatggaggttaatcatgctgggaaatatgcatgtatttatggcagttctgggaaccattctgttctttggatttcttgccgcatacctgagccacaaatgggatgactgatgaacgacgataatccccacccgtaaacgccccctgctgccaatgcaccagggggcgttctgcttttggcttgccgatcgatgaaccaccttatacacgataatttatcgtatcagtcaccaggagaaactccgtccgaacatccctcaacagcccactcgatgccgatcgttgataggctatgttatgctttgtcatcacgggcaaggaggcagaatatgcacatcaataccaaaatgaggattgcggcgcttttataccttatggcggcgtacgcggttgctctgccggggcttgcgctgtttacagacctggtgataaacggtggcattattgatatgtggaaaggcgcgtattcatttatggacctgcttgcccgacgtaaaatactttatctgcagtttgccgggctgggcgctactctgggttgtgtctactggctgtttttcttccgaaaataccgccaccacgatcccctcgataaatattttaagtagcgcccggcacgacgtactgattatgcccggtcagcgaatgatgaaatcagagccagaagcatcgcgcataccttcataccgttcgctggacatccgtcagctgcggcgaggcttccagccctttgccagggttctatttagcctgcagctcccggcggataatttccgccccggcgcttagggcattgagcttgccgctcgccactggacgcgatagcggcgccatgccgcagttggttgaaggataaagcttatcggcatccacaaactgcagcgctttacgtaaggtcgcggcgacttcctccggcgtttcgatcgcattggtcgccacgtcgatggctccaaccatcacttttttaccgcgaatcagttcaagcagatccatgggaacacgtgagttatggcattccagcgagatgatatcgatgctggaggtttgcagcttaggaaacgcttcttcatattgtcgccactctgttcccagagtctttttccagtcggtattcgctttgatgccgtatccatagcagatatgtaccgcagtttcgcatcttagcccttcaacggctctttctaaggccgcgatgccccaatcattaacctcatcaaaaaacacattaaaggctggctcatcaaactgaataatgtcgacgccggcggcctccagctccctggcttcctgattaagtatcttcgcaaattcccaggccagtttttcgcggctcttatagtgattgtcatagagcgtatcaatcatggtcatgggccccggcagcgcccacttaatcggctggctggtgagctgacgtaaaaaacgcgcatcttcgacaaaaacgggtttttgacgctcgacggcgcccacgacggtcggaacgctcgcatcgtagcgattacggattttaacgacttcgcgtttttcaaaatcgacgccgctgaggtgctcaataaacgtagtaacaaagtgctgacgggtttgctcgccatcgctgacgatgtcgatgccggcgcgcagttggtcaaataaggacaggctcagcgcgtcttttttcccggcaattaactcttcattctgcagtttccatggggaccacagtttctcaggctctgcaagccaggacggtttcggtaagctgccggctgttgaagtgggtaataattttgtcattatcgatagccttatatatgcgatgtcttaaagagcgtaatgagcagaccattgctgcagaatatttttatacggtttaataaagtgctcttcggtaaacttcccctgctctaccgccagctggctgcgctcttcacgatcgtaaacaattttggttaatgaatggtcctgatggtgcagatcgggctgatagcagagtcctgcggcagagttggcgttgtagatctccgggcggtatatcttctggaacgtctccatcgtgctgatggtgctaatcagctcaaggctcgtgtaatcgctcagcaaatcccctgagaaataaaaggccaaaggcgcaacgctgtttttcggcataaagtagcgaaccttcaggcccattttgccaaaatattgctcagtcaacgatgaaccctctgggcggtattcgagccccaggacaggatgttgatttccggtctggtgataggtgtctttgctggagacgctaaggcaaataaccggtgattttttgaaattggccttgtactccgctgaattgacgaaatgtttaaatatgttgccgtgcaaatcgccgaatccttccggaaggctaaaacctgcgcgtcctttattatggtctaacagcaatacgctaaagtcgtagtcgcgaacgtacgaagagaaattattgccaacgatacccgcaatacgttcatcggtctttttatcaataatgctggtttgcaatatttcaatcaccggaaaggtatcgccggtggcgctgatattcatttcggctgaaataatttccagcacaacggcatagcgatcgcctttggggttatcccagtgcgccagcgtattgaaacgattgtcaatcatgactaaggtattgcgcagattctcctggcgattttcccctcttgctaaattagcaaagttggttgtaatacgcgtattttctgaggggttatagttttcatcaaagagagtgcgtttaatagtaaaggtaaattgttgattcattgcagatgtgcatcctaagttctgagataaaaactgcagtcctttctgatggttgcaggctggcgcaggcttccataagcagtcttcatcttcatattatctatatcgaatacagcatgttatgccagagccattagatgagtgaaagcgagttaatttcattacaacatgagccatattcatggtctggcgtcagcccatgctgtatctcgttgaacagagccagccgctcttgccaacgagcttgtcctgccggttaaacatccgcacattttcctgttcgcctgtatgagttgatgctgaagcaagaaacatcagaggtcggccagggtaaacacgacctcaagcctggcgtctttcttttcaacaaccacactcttcatgctcctttgcgctctgtcgggcgcgatcgttggaggaatatggaagtgggaccggcgcgttttcatgctttactttggtgatgtccaaaacctgactaacgctaccgatattttttctggcatatttatgttctatggttaattcggattatcaacagcgaatatagccatcaacaacccgctctaacttattgatttgagggatacaatgaataatgtcattctcagcataattgctaaaatttccgccatggatgccgaaagtaagcagcttgctgcccaggtcgaggcgcagtctttgctcattagcgcgctgatgctcgctatcggcaaggaaggcggcgtcgcggaattagttagcagcgtaacgaaagcgataaattcggtactggaatcatctgaagacgttctgaagacggacgcagaactgcttctgaccaagtttcaggaacaaatagcgctcacgcagttgataagcacccacgaagatgaaatcagtcatgacaggcttgatgattaacaagggtcagtctgttatagattgggaatatgcagggcttgcggttagtcatgagcttaccggccatcagcaactattggccggttcagcttcaaaaaatagggatactccaggcggaatacgcaatgtctcctcgcctgcgctgctgttggaggcaaaccgctcggtacattaaggcaaatcaggcttcacttttccccaggccagcgtatgtcaccgacgccgttgactttcggcatggcaaataaaaatccctggaagcgtttaatacccgcagattcgagccagcaccactcctctatccgctctatgccttcagcaaccaccgcaatctcaagttcacggcagcagttgataatcgatcttaccaccgcttgtttagggccgctctgatggatatcggtaataatctcgcggtcgattttaactttatcaggctgaatttttgtcaacaacgagagtccagcataaccggcgccaaagtcatcaattgccagccccataccagagacgcgcagtttttttatcgcgctgctgaactggctaaaaccggagatcatttcatcttccgtcacctccacgatcacctgttcgggttcaagaccctgtttttttatttcctgcaacaggtattcaatggcatcaggaataacaaccagagacatcggaaggatattaatggatattttatggtcgccaatattgatttctttcgccagggcaaaggcaactgatttcgctttgagatcaactttataacgttgctctggcggaatcgaggcaaagaaattggcgggactaccgccgtctttatcacgaataagcgcttcaagcgaagtgatattcccggccaacggttcgataatgggctggaaagcaaactgacagcattgaccggcaaaaaacgattcttgcggcgcatgaaatgcatgtttacgcgaatgaagcgaccatttgtcaggccgtaaaaagggtgacggcgcggcagcgcttttttgactgataaaagtatggataaatttatagacgcgctcttcggtggaaagataacctttcagttggctaagctggcgaacctttgtcaggacgtcggcggtttgcagtttattcaggtcaaaaaacatcatccctacgttttcgaagcgccggcgcggcgcgtaatcacgcatcagctcgacaacctgatggtggcgatcgtcttgcttgatcgtgctgaatagctgctcaagcacgcactcatccccctcaagtatctgaaggtaaacattatcttttaaaagaagtatgcccgtaatcccgcgtgctgcgttctcagcattcgctttttcaaccagcagtatgagatcggtttcttgtgttaaatgcatctgacttctgtaaatcagagttgtcagcataatcccatccagatgtttgccaggagaatgggactgtgtaacacagtttacccttttaacccaggctatctgtcataattaactggaccggctgtagccgactaagtttatccgattatttacggcagcaaccggcaagggccagcgaaataatcttcagcggcgcgggtaatggcagtgattcattcagcagccatttaaaccgtttggtaaatgcgtttttttaagcggtatttactagccaacaaatccctgctcgcgcatacgcgctatcgcctcttcgctggcgcagaccatgcccgtggtcagcgtttcaaaaccaaagcggcgataaaagccgactttatccaccaccgagtagatgaaggttttgccgaacggccgcagccgatcgctaaccgattgcatcagctgctgcccgtacccctttccctgacagcgcgggtgcaccgcgacatctgccagatagctgcaccaggtcaggtcgctaatcgcccgggcaacggcaataagctgcccgttttcatagccaaaccagcaaaaggtactatggcgaaacgcgcgctccaccagcgcgacgtcccgctgattgagacctgcggcggcgataatctccgccaccgtccgccagtcaaccgagtccacgtgctctttatcttttaatatcatcatgacgttgcctttcactcgcctgctttggctttcagcatagccgaatggcgctaaaaaaagcgcgccctgccgcccccggtcaacagcattttatgctggataaaaaagtataagccggggaaattttctgacaccgcggcgtgaaaacagcgcatttatgcttaacagcggcgagtaatcgaccaggaggcagaattaaataaaataacgccatattctaacgaccgaaaacgggcaaaaaaaaaccgccatgtgactggcggtgaatgaatgcttgcatggatagattgtgttttgcatttttacgttcagggcataaccccctgagtacgcttgtccgataagctatcacgcgcaacatcaatgaaagctaaacggaccgttgcttacagcttttccaccagcgctttgatctgcgcgacaagaccctcttgctcctcctgcctggcgcccgcgcagggccaggtggattggcggataatcaggcgcgtcggcagcagctcgcggatcttcatctgcggggcagccattagctggatgagcagctcaaccgccctttttcccagaacgttaaaatcctgggcgacggtggtcagcggcggctggaagtagaggctgtcagcggtatcgtcataaccggtgaccgagatcgcctggctgccggtgcgattcaactgcgccagcgcgctcagtaccccgagcgccatctgatcgttagccaccacgatggcgctaatgcgcggatggtgatgaaggagctcaaacgttttgttccagccgctggcggcgctccagtcgccaaacaccgtcaccgcattactgacgcccagccgatgcagcgcctcgcgccagctgctcaatcgcatgcgcgcggagaccgagctctccggcccggccagcaggccgaactcccggtgcccggcgtcccagagatgccgcacgcacgcgccgcagccgtcgcgatgatcgaaacgcacgcagcacacgtcggtctccggcgaaacatcaagaaacatgcaggcgatatcggggttttccaccaccagccgctccgcgaggctgctttcgagcggcaggctgataatcgcgccgcgaatatgctgggcgcgaaactcattaagccgcgcctgcagcgacggatagtcgacctgcaccggcatcgcaatcgagacctcaagctgatgcagaccggcgtagcttttcaccgccgcggcgatttgtgaaggcgcgtgcagcgtcagcgaagcggttatcagcccaatcgacggcgcggatttccccgccagcagcttagcggaacggttcggtacgtagcgcagcgcctgcatcgcgcgaatgaccttatcgcgggttcgttcagacaccacgtccggattattcagcacccgggagaccgtctgctgagacacgccggcctcgcgggccacatcgtcaagcgttgccaggcgacgctgcatagtgcactccttctgaattaaaacctcaatgtcgtccgctaacattttatgtttaaaagacgacaaaaatcagctgtttttccagcttttcgtgatcgccagtgggtttcattttcgccaatattgcggctatagcgaaaataactgataacaaaattatattgtctagcgaatgacatttttatcacttatccgtcaggaatacgtatgcaacaacacgactctcattccgccgcagcagcaacgttccatcagattctcgcccgcgaagactggcagaaccagaccattacccatctcaaccgtttaccggcccacccgactttcgccagctggcgcgataccgacgcggcgcggaaaaaccagccctcggcgttccgccgccggcttgatggccagtggcagttctcctgggcccgcagcccgtttgacgtggatgcccgctggctggaagacgatctgccggacagccgcagtacgccggtgccgtcaaactggcaaatggaaggctacgacgctccgatctacaccaacgtccgctacccgatcgacactacgccgccgcgcgtacctgaggagaatccgaccggctgctactcgctgacgttcagcgtcgatgagagctggcgaaccgacggccagacgcagattatcttcgacggcgttaattcggctttccatctgtggtgcaacggcgaatgggtcggttattcgcaggacagtcgcctgcccgcggctttcgatctctcgccctaccttcagccgggcgataaccgcatctgcgtgatggtgatgcgctggagcgcgggtacctggcttgaagaccaggatatgtggcgcatgagcggcatcttccgttcggtctggctgctgaacaaaccgaccctccacctctgcgacgttcagcttacgccgcagcttgatgcgctctaccgggatgccgagctgctggtgaatttaagcgtcgccgcgccggtcgcgctgctggaggcgctgacggtgaagatcgaactgtgggatgacgatcgtctggtcgccagccaccagcagttgccgggttcgccgattatcgatgagcgcggaagctatgccgaacgcgcggcgattcgtctgccggtagagcgaccggcgctgtggagcgcggaaacgccaaactgctatcgggcggtggtgtccctgtgccgcggcgatgaaacgatcgaggctgaagcctgggatatcggctttcgccgggttgaaatcaaaaacggcctgctgctgttaaacggcaaaccgctgctgatccgcggcgtcaaccgtcacgagcaccatcaccagcgcggccaggtggtgaccgaagaggatatggtgcaggacatcctgctgatgaagcagaacaactttaacgccgtgcgctgctcgcattatccaaacaccccgcgctggtacgagctgtgcaatcgctatggcctgtacgtcgttgacgaagccaatattgaaacccacggcatggtgccgatgaatcgtctttccgacgatccggcctggctgccggccttcagcgcccgcgtcagccggatgttgcaaagcaatcgcaaccacccgtcgattattatctggtcgctggggaacgaatccggcggcggcggcaaccatgaagcgatgtatcactggctgaagcgcaacgatccctcccgcccggtgcagtacgagggcggaggcgccgacagcaccaccaccgatattatctgtccgatgtacgcccgcgttgagcgcgatcagcggattccgacggtgccgaaatgggggatcaaaaagtggatcagtctgccgggcgagcagcgcccgctgatcctctgcgaatacgcccacgcgatgggcaacagcctcggcaactttgctgattactggcaggccttccgcgactatccgcgcctgcagggcgggtttatctgggactgggcggatcaggccatcagcaaaaccttcgacgacggcagcgtcggctgggcctacggcggtgattttggcgatacgccgaacgatcgccagttctgtatgaacggcctggtcttccccgaccgccgcccgcacccttcattaattgaagcgaaacacgcgcagcagtacttccagtttaccctgcttgcgcaatccccgctgcgtatcagcatcagcagcgaatatctgttccgcgccaccgataacgaagcgctgcgctggcaggtccaggccgccggagaaacctttgccgagggtcaagtgaagcttgagctgagccctgaaggccagggcgagctgacgctgtgcgatgcgctgacgctgcccgtgggcgccgaagcggtgtggctgacgctggaggttgtccagccgcaggccaccgcctggtccgacgccgggcatcgcgtcgcctggcagcagttcccgctcgccgccccgctggcgctgcgccggccttcccccgtcggcacggcgccagcgctggagagcagcgacgcggcctggaccgtacgcagcggctcgcagcaatggactatcgaccgggagagcggcctgctgacccactggcaggtagagggtgtggaacagctgctgacgccgctgcgcgaccagtttgtgcgcgccccgctggataacgatatcggcgtcagcgaagtggagcgcatcgaccccaacgcctgggttgaacgctggaagagcgccgggctctacggcctcagcgcccgctgcgtacagtgcgacgcccagcgcctggcccatgaagtggttatcgatagccgctggcactatctgcgcggcgacgaagtggtgattgtcagccactggcggatgacgtttgatggcgaaggcaagctgcatctggcggtcaatggcgaacgcgccggcaccctgccgcctctgccgcgcatcgggctgaatttccaggttccggaccagcatcaaccggtttcctggctcggctacggcccgcatgaaaactatccggaccgccgcaccagcgcctgtttctcccgctggcagctgccgctggaagagatgaccacaccgtacattttcccgacggaaaacggcctgcgctgcgataacaaagcgctggactgggggcgctggcacgtcgcgggcgatttccacttctccgtacagccctacagcaccgagcagttaatggagaccgatcactggcacaggatgaagccggaaaacggcgtctggatcgcgctcgatgctcaacacatgggcatcggcggcgatgactcctggacacccagcgtactacagcaatggctgctgcttgagacacaatggcaatatcagttaacgattcatttccaataataatcgggggcgccagcccccaaccttacaggcataataatatggaatattcacaatgaaactctctgaactcgcgccacgagaacggcataattttatatatttcatgctgttctttttcttctactatttcattatgtcagcctacttccccttcttcccggtgtggctggcggaagtaaaccatttaaccaaaaccgaaacggggatcgtcttctcctccatttcgctattcgcgataattttccagccggtgtttggcctgatttccgataagctcggcctgcgcaaacatctgctgtggacgattacgattttattaatcctgtttgccccgttctttatttttgttttctctccgctgctgcagatgaatatcatcgcgggcgcgctggtgggcgggatctatctggggatcgtcttctccagcggctccggggcggtagaagcctatattgaacgcgtcagccgcgccaaccgttttgaatacggtaaagtgcgcgtctccggctgcgtcggctgggcgctgtgcgcctcgatcaccggcattctgtttagtatcgaccccaatattaccttctggatcgcctccggcttcgcgctgatcctcggcgtgctgctgtgggtctcgaagccggaaagcagcaatagcgccgaggttatcgacgccctgggcgccaaccgtcaggctttctccatgcgcaccgccgccgagctcttgcggatgccgcgcttctggggctttattatttatgtcgttggcgtcgccagcgtctatgacgttttcgaccagcagttcgccaacttttttaaaggcttcttcgccagcccgcagcgcggcaccgaagtgtttggcttcgtgaccaccggtggggaattactcaatgcgctgatcatgttctgcgcgccggcaattattaaccgaattggcgccaagaatgccctgttaatagctggggtaattatgtcagtccgaattttaggctcctctttcgcgacctcggcggtggaagtgattatattaaaaatgctgcatatgtttgagatccctttcctgctggttggcacctttaaatatatctcgtcggcatttaacccaaaactttcggcgacgctgttcctgatcggctttaatttatcgaaacagctgtcgggcgttgtgctctcggcgtgggtaggacggatgtatgataccgtcggcttccatcaggcttatctgatcctgggctgtattaccctgagctttaccgtcatttcgctgtttaccctgaaaggcagcaaaaccctgctcccggccgcagcataacgccaggccgccggaaaccctccggcggcgcgtcggcaatacaccgttaagacgccgggtaaggctgttgccgctagccggcgatccgcgtttccccgtcgctattttccagcccgtaaaggcgcgcttccgccatcgatgaaatcagctcagccagctcggtggagtggctggttaaccagatttggctatagcgggacgcttcgacaatcagccgggccagcgccgggaacatctggcgatgcaggctgttttccggctcgttaatggccagaaatgccggagggcgcgggcttaatagcgccaccgccaggcacaggaagcgcagcgtgccgtcggacatttccgccgccagtaaaggccgccagacgccgttacggcgcatcttcatcgagaaacgcgagttttcgttttcacaataaaaggtacacgccgggaacgcttcgccgaggatctcatgcagcagctcttcggcgccgatttccacgatggtctgaaaggcggcggcgaggttgtgcccatcgctgtcgagcaccggcgagcggtagcctaccgtcgggtgtcgcagcggtgagagtctgccaatattgaattcgtgataaaagcgccagtggcgcatggtttccctgacccgcgagacctccggaaaacggtgcggctcgcccagttggccaaaaatcgattcattctcgtaaatggcgtcggtaaaagtactcttttcgccattcacatccaccaggaacgccgcctggtttttacgttccagcacgcgcgatgaaggacgtcgggaaaatcccgccagccagatcgactcctctttaacgattggatccagctgaaactgggtaggataaggcagcttttccggaaaacccacctgcagctggtagtcaaactcgtcggtcagacagccaatctgcagccgccgcggaaagcggtcggtcggcgcgcctggcccggaccacataatgttttccagcccgccctcatcgctgatatagccggaaaacttcccgtcggcgcaggcggttaacaggtggatggctttatagatattggatttaccgcagccgttggggccaaagacgatattcagcgcaccgagttccagctcaatatccctgaccgatctgaaattttttatccggatatggttaatcatagattcccgaaactgataaaagcgtttggcgctactgtatcggatgcgaaaggaaaacaaaacaggcgcggaccggacgactgcttgccgcccggctccggcttagctgaagagttttttcatgccgcgggtcagcgcgactcttttgagtttgtccgtatcctcatggctctcgttgaaaacgccgaaaaaatagcgttcatcgtcgatagtctgcgatacgattctgtagctcagcggctggccggatttcgcgccgtactgcgcaggcgtcacggaaatctccgtcgcgttatcggcaacgctaaccatcaggccgtcgcccttccctccaaccagcatcaccttaattaacgggtgcaccatgtccctcccgggttgaggtcaatgattaattttcgatggccgcaggctgacagttggccgttgcgccgccgtggccggacttgtctttagcggaggccggctgagcgccctctttaccaacaacgggcggtaacggcacgccttctttgtccaccgcaggcgacgccttctggcaggtcgccgttttcgtggcctctgcgctccagactggggtttgcagactcaggatcgccacgggagcaagcagcaacgtgttcttcagtactttcttatagttcataccggccttgagtaaaaaaatttctttcttatgctgagctaagcgctgattattaggagtaaaagctgacaaatgatgaaggaaaaaagaggaattgtgaacatcaatagttcttatttatgaattgctgcctttcctgcccccgcgcccgacggatcttatatctaagaattaccttaatcaattgaaatgacggcaatccccccattctggtgacgtttttttttcgccagagtgtagcacttttgtggcagaaactgcagcctggtttatatcccggacgttgtggaaaattcctggagtgaggctcgccgacggctgagcatttgtacttcgcttgttagccactagacttaaataagtcaaacgaaaggagactcccatgtcatcacaagagtatgaaaacgacgcgcagaatctggcggacaaagtgagcaacaaagtcaatgaattcgccggggaagcccagcagcaatttggtgatgcggttgattcgcctaaacatcagctaaaaggcgcggcccgtaagtacgccgctcaggcgtcggatgccgtttcagaggtctccgagcgcgtaagggaaaatccgctgaccgggctgctggcggccggcgctatcgggctggtgattggtttactggcgggacggaaataacccattctaaggcccttcgggccttaattttttgcctccggcgcgcttatgctaacgctgactcaaatcgccacgacttcagctacgtcaaactgaaaaacgtaagggtcggacaacaggtggaattgctcatcatccgcataggtcactgcgacatgatacgcttcaccggcaaaggcgatgaccgcatccagattgtgccagtacgttgccaggaagaagtgttcccactccccctgcgtttcccgtctgacaaatgcccccgcgttgccgctgatgccctgggaatgctgtacgcctgtcgcctgcaaatgaaccgcaaacgcatcgccaaactcaacgggaacacaaccatgccaggttctgacaatcatctctacacctcataaaaaatcaataaagatgcatttatagcaaacaaatggcgataatagtgattttttatgcaattgctttatgcgcatcataccgcctggtacatcccggacatttgcaggtataatctcactcattattcagcggattcagacacgaagatgacaaaactcaccttacaagaacaaatgcttaaagccgggttagtgaccagcaaaaaaatggccaaagttcagagaacggcgaaaaagtcccgcgttcaggctcgcgaagccagagaagcagtggaagagaataaaaaagcgcagcttgagcgagataagcagcttagcgagcagcaaaagcaggcggcgctctcgaaagagtataaagcgcaggttaagcagcttattgaaatgaataaaatcgatatttcaaaaggcaatattgattttaacttcacggataacaacttcattaaaaaaatcgccgtggataaacccacccaggcacagctgattagcggccgtctcgccattgcgcgtctggccggcgataacgacggcgagagcaaatacgcgattatcccggcaagcgtcgccgataaaatcgcccagcgcgacgccagcagcattgtcttaaacagcgcgctaagtgcggaagagcaggacgaagacgatccgtatgctgattttaaagttcccgatgatttaatgtggtaagcaatgcgggcctgcgcagaccggcgattcaggcctggtctgcgcaggcgttgtgctttacactgcgcgcggcaaaaattgagtagataaacgattaaccaggcggtaacggcgatgaacggaacgatcacaacgtggtttaaagataaaggttttggatttatcaaagatgaaaacggcgataatcgctattttcatgtgattaaggttgccaaccctgaactcattaaaaaagatgcagcagtcactttcgaacccaccaccaataacaagggtttgtcagcctatgcggtaaaagtcctgccggaaagcaaatatatctatattgcaggcgagcggattaagcttacatcgatcaaatctttcctggtgtacagcgaggaagagcccgccgatgcccgcatcgacaaagagaatgcggtcctttccgtaggcctgttgatgggaaacatcaggccaaaatccaccgctaagcctggcgaaatgcgctcggtgaaaaagctggccattaccaccttccagggaaccaccctcatcttttcggaagatgagatagacattgaggccacggtaaaactgcttaaggtgtgaaagcgtatggctcaacaaaccgggctctgcgcccggtttgggagtgatgacaaacctgtttaaacatcttccccggatcttcaccgggtggcggctgacgccttacccggcctgccaataccagagtcacaacctgccgcgcaatttctttggactcgtgcaagcgaagcaccgttgggtaattccagccgttctgttcttatccgcaatgggacgccgggatctgcgtcctttattaaccagataattttccctccctcagccaatatccacctgcctctcggtttattccagtcgcgctcgcgttatgcccgtaaaacatgacgcaaaatacgctaatccgcgttagctgttaaaaaggttattattaccctaaataattcgagttgcaggacaaggtactcgtgccttgaacagcgcttacgctggccccaaggggcgaagccgcaggccgagtaacaaagccaacgcacaggcaacttgaagtataacgggtatataccgcacaaagtgaacagcatttacatcatcgtcatttatcctgttagccgtaaacaaaatgggtgatattaatgactgtatttaaaagcttgctcttctttcttggcgcggcttctgcctgcgcattcgtggtattgtgcctttgggtcgatatccacttttgggattataatatttctgaattatcactcaccgaaattgtacaggagctggttttaacggccatcgtttttattcattttcggcttgcgaagcagtataacgccatgcgctactgtcatattcttgttggcggctttttccttgccatgctcattcgtgagctggacgccctttttgatcttatttctcacggcagttggctgtggtttgcgctgactgcagccctgttagccttaatttatccacttatccattatcgtcaaaccctggcacagctggcgcaatatacccgtacaccctggtacggcgtattaatcagcggcctgttggctattctggtcttctctcggctcttcggcatgcagggcttatggcatgcaattctcaatgatggatatgtcagagtggtaaaaaatgtcgtcgaagaaggctgcgaatcatttggctatatgctttgtctcaccgcctcttttggccattatcgtaattttcgcggaacctggggcagacatcatattgagccccgttgataccctgttttcatttgccttgcgcacggtgatgagtgaggtaagtcctaaaatgttcccggcggtaaacgctttgttggttttgcccaaagcgcgaggctaaaattttgccgctatggtactgcctccatagcacattgctcacctgcagctcttgcatacggtttgcaggtgagcagccttatccgcagtaaaatttacttattcacattttatccgctgatttcttgatatatcggcgatccgttccataatgaagtctacgcacatcgcgcccttctttaggggatacgccagtagcagcacttttggacatgaccgcttctgcagctagcccccatccggcttgatcatcgacatctctcagaacagagtttttggatgttattcaatagctttttcctgtgaagtcagaaacgcgttttctcaaaaaaatcttgaaatgaggatttaagcccatgaaatatgtatagttaccttgatatagaaaaaatcaaagccaatcttgagtggattgttaatcaatcttcagcaaactctgagatgccctccgtttccgatcgcaaaacaatctacagccttctggagctcatacagacctatgacggactgctggagttaattgcccaatacggaattaccgtagtcgataaggaaatcatcgaaggcttgtcccttacagaaaggtttatcgctaaggtcaaatcgaatgcgaatgcattttagccatgccctggcaccgcggttttccagcatcagttcactcttaacagcgcgctcgcgccactggcgataaagcgcagttaaatcaaaacccgtgccgcgagacaaaatggcctcgcggaagcgctggccctgttcgtgggttaaaccgccctgctcaacgcgtcccggatagctacgcggtggaagtatcaaatcaacggcatgcatgccgttaaatgacgaatagcgtctcgccctatgattcaatggacgccgctaaagattagctttggatgctatattcataatgattttctgaatgattgccattaattaataaaaaccgtgaatgcaaattaatagtggcataacaaatcttggcatttagtgcgattaaaaatgctgaaaaacaaacaaatcacctacacaaagtactgatttggctgcgaatttttattaaaaagtaaatctgttctttcttaaaacctattgccattatattaaataagaaatatcctaatctcatcaggcgttacttaaataaaacatcatacggcggtcgaaattttttcctccgtctttttaaaaataagaaaatcatgctaaaaatcgccatcattaccaaaaacatttatttagaaaaggccatagaggaacttacccaagaaatttccagcaccaaaggcataggcgacctttgtttccaaagaaacaacatacaagatcacctcacaaaaccagacataatttttactgagatggaggttggcgagtatttattatgtcaggaaatgaaaaaatacaaatcagagtgtccagcggtggtaattttcaccaaaaaagaaataacgtttaatccttgcctgctgcctttatgcgttcaaaatgctgtcattttatttcataaaaacagccttgaaacaatcaaaaaaaacctgtctattctctttgatgaatttatcgcgggcgataagaaacgtataacgatagagaagaatcgctgtttaaaatgcccgcatcagtcattgagtcgttcgcaactaaaaatcattaatgccataaatcttggccttaacaataatgaaacagcaaaaaacctgggcatcgatcacagaaccgtatactcccataaattgcgaataatgaagaaattccagttagaaaacaaccaggagcttatcagattctcttccatcgttatgagaagaacatctctctattttaattgaatttcatacgcttgcttttaaaactcaacttttgcttttttctgtctttaaaatacgaaaatccagaaatcagtgaaaccagcaataaaaaaaccgcgaataccagaagcaatatattagccatactcaatccgttcaataaaagatatgcaagagataagacagatgatagagtgaaaaacattcacagagcaagttcgcttattaaatttaagaaatccatgcaacaatgtaagtaaactcctaatattgcaaggaagctatatttaatatattaatattatttttcgctaaaaaacactttatgccgggcttcatgtttttatgcaaaagtggccagcgcgtcgatgcacgggattaccataacaggacaaaccattccgagggcgctaaattgggcggagacgttttgcagagtttggggaaggaaaaattggataaaaaaccgggcgctgcgcccggtcttcttctactcgtcaaaacgcgcgactagctcagcccgcggttttccagcatcggttcaatctgcggatcgtgtccgcgccactggcgataaagttcagctaaatcagtgctattgccgcgagacaaaatcgcttcacggaagcgctggccgttttcacgggttaaaccaccctgctcaacaaaccactggtagccgtcatcggccagcatctgcgtccacagataggcgtaatagcctgccgcgtagccgccgccgaagatatgcgaaaagtagctgctacgatagcgcggcggcacggcggccagatccatattctccgcacgcagggacgcggcttcaaacgcatcaacatcgtccgggagtttatcctccctcacgctatgccagtgcatatccagcagcgccgctgcgagcagttcgctcatgtcgtagcctttattaaacttcgccgcgcggaacatgctgtcgcgcagcgcggccggcatgatttccccggtttgatgatgccgcgcatagtgggcaaatacctgcggctcgctggcccagtgttcataaatctgtgaaggaaactcaacaaaatcgcgcggcgtattggttcccgacaggctggcatacttctggctggcaaacaggccgtgcagggtatgcccaaattcgtgaaataaggtgatgacctcatcccaggaaagcagcgcgctatgtccggctttgggtttctggtagttacagacgttataaattaccggatgctgcgcacgcagggtggattgttcaacaaatacgcccatccacgccccgccgcttttgctgtcccgcgagaagtagtcgccgtagaacagcgcaattccctctccgttagcgtcgataatttcccatacctgcacgtccggatgataaaccggaatatcgaatcgctcgacaaagcgaataccgaacagctgtgtcgccgtccagaacacgccgtcgcgcaggacgcggtcgagggcaaaatagggcttgagctgcgcttcatcgatggcaaatttcgccctgcgcacctgctcggcgtaatagagccagtcccacgccgccgcgcggaaatcaccgccttcattatcaataacttgctgaatatccgccagctcctgctcggcccgcgccttcgccgccggagcgattcgccgcataaaggcaaacgcctctgccggatcgcccgccatctgatcggccattgaccagctggcgaagtcatcagcgcccagcagctgcgctttgcgcgcgcggagctccgctagccgcagtaccagctcgcgagtgtcattcgcatcgcccttctgatttcgcgtccagcctgctgcaaacagattctctcgcgtctgccggtcctgcagcgaaaccagcgcgggctgctgggttgtattgagtaaaggcagcagccagcgcccacctaatcccttctcctgcgcggcttctgccgctgcgcttatttcatcgtcgctaagccccgcgagctgatgagcgtaatccaccaccagaccgccagattttaccgccgccagcaggcgctgctgaaactggctttgcagcgctgccgcttcggtattcagcgcgcgaagcgccgctttttgatcgtccgcaagcgtggctcccgcaagggtaaagcgttgccaggtcacctccagcagacgtcgggattcggcgtcaagggagagcgactctcgccgctcccacacctgcttcacgcgttgaaaaagggcatcgttgagccagatatcattcgccagttccgccagctcagaggaaaactgctcatcaagcgcctgaatggccggattggtctccgcgcccgccatagcgaagaagacgttggttacccgagccagcagctggccgctctgttccagggcttccagcgtgttggcaaaatcagccggctgcgggttattcgcgatagcggcaatctctgcgcgctggcgacgaacgccctcgtcgaaggccggacggtaatgactcacgtcaatcaaatcgaaacgcggcgcctgataaggcagcagactgacgctaaaaaaaggattgttctccgacatcttcatctcctgaacacgattattctgtaagattaggcaactcattgattgaccgcaatgattactctgttcaccgccgcgttcggcggagaggtctggtgatttccattacccgtcgccgggatcgcgtgctatggtatgaagacacaaaaatcgttgaggaacagtaagatgattatcctggttaccggagcaacagcgggttttggtgaaagcattactcgccgttttatcgctaacggtcacaaagtgattgccaccgggcgtcgcgaagaacgcctgaaaacgcttaaagatgagctgggcgagaacctttataccgcccagctggacgtgcgcaaccgtgcagccattgaagagctgattgccggactgccggcagactggcaggcgattgatgttctcgtcaataatgccgggctggcgctgggactggagcccgcgcataaagccaacattgaagactgggaagacatgattgacaccaataacaaagggctggtgtatatgacccgcgccgttctgccgggtatggttgagcgtaatcgcggccacgtaatcaatatcggttcggtcgccggcgcctggccttatgctggcggtaacgtctacggcgcgaccaaagcgtttgtgcgtcagttcagcctcaatcttcgtaccgaccttcacggtaccgcccttcgcgtgaccgatattgagcccggcctggtcggcggcaccgagttctctaacgtgcgctttaaaggtgatgatgctaaagccgagaaagcttacgaaaatactcaggccctgactccggaagacgtcaccgaagcggtctggtgggtcgcaaccctgccaaaacacgtcaacattaataccctggaaatcatgccggtcagccaaagttttgccggactgaacgtgcaccgccagggctaagctctgtaacccggcccgcgggccgggtctgggctggaaggcaaaaaacgcgtaaaatagcgcaaatacctcatataaaagtaatcatccatggccgcagaagcacacctgaatccgacacagcccgttaatcagcaaatttatcgtatcctgcgtcgggatatcgtccattgtctgatcccgccaggcacccctctttcggaaaaagaagtctccgtgcgctttgacgtttcccggcaaccggtacgcgaagcttttataaaactggctgaaaatggcttaattcagatccgtccgcagcgcggcagctacgtgaataaaatctcgctctcgcaggtgcgtaacggctgttttgtccgccaggccatcgaatgcgccgtggtgcgacgcgccgccggaatggtgaatgatgaacagctctaccagcttgagcaaaatctcaatcagcagcgtacggcggtggagcggcagcagttaacggattttttccagctggatgacgaatttcatcagaagctctcgcaaatcgccgactgccagctcgcctgggataccgtcgagaatattaaagccaccattgaccgggtgcgctatatgagcctcgatcatgtgaccccgcccgatatgatgctgcgtcagcactatgatattttccagccgctggtcgcccgcaatccggatgcggttgaaaaagccatgcgcctgcatctgcaagaaattagcgagtccgtgctgcttgttcgtcaggaaaacagcgactggttcagcgaggaataaaacgagttgcggcagaacaggttatctgccgcgagagattgatgatgactcttacctgacaaccagaaccggtattttagcgtgacgtaaaatcgactcagcgtttgaaccaagaagatgagtggatatacccggcttgcgggaaccaataacgataacgtcaaaatcctcattgccgctcaccgccagaatttcatcgcgcacgttgccaaagaccactcgggaatgaatccgcccggcgggaatggagaacagacgggatattgtcttcatctttttctcagattcctcacgcatataggcctcaaacttacgtatatcggccgcaaaaccgcgtaaaattgagctgctgctgttcggcagaacgttgagcagcgtaatctccccttcatccgctgatgctaaaaactcagcatggcgaaccgctttgtcacttaaatccatttcaaaaacgtctacgggcagcaaaatttttttgtacatagtccgttctccttttttctgaggaaacttagtaagttaactcatcatgccatatttacttcaccaggagaatgaataatcatccagataaatatttaattcattaaaataaacatcagttatttatacttaactgttgttagataaagttatgtatattcaacgatctggatcaaagattgcgcctgacgggaaatatatttctggcgggaaaagcgttcagggatacagcatgagggcaatgccgccgggaccggcggcacgcgggtgaaataaattagtttgcctgagcccaggccgctacggtcgcttttgcgccgtgctgctgcagggataaataagcgcgaaccaccgcgttcacgaaacggctctcctggggcagactggcaccgaaaatagcctcaatacccagcagtgcgcgcacgcgttcttcgccgtctgcgctattctgtacggtttgcgcaatcaccggcagtaaaggatcggagatttcaatcgcctgcccctggtcatccaccccgctgacatagcgcatccaggccgcgacgcccattgccaacagcgtaaagtcgccgccatgcgccaggtgccagcgaatcgaatccagcatccgctgcggcagtttctgactgccgtccatcgctatctgccaggtgcggtgcttcagcgccgggttgctatagcgctcgatcagcagaccggcatagcgtgccagatccacaccctgcacgttcagcgtcggcgcctgctcctccagcatcagcgcacgcgcggcgcgacggtagttttcgtcctgcatacagtcattaatatgctggtatcccgccagatagcccagccaggcaagaaacgagtggctgccgttcagcatgcgcagcttcatctcttcaaagggcagcacgtccgacaccagctcagcgccggctttttcccactgcggacgaccggcgacaaagttgtcttcaatgacccactgacgaaacggttcgcaggcgacgccagccgggtcgcgaacgccggtgagctgttcaattttctccagcgtttcggcagtcaccgccggtacgatgcggtcaaccatagtagaagggaaagtgacactgcgcgcaatccactcggctaattcggcatccacggcgcgggcataggcgcagacgacattacgcatgacgtgaccgttttccggcatattgtcgcaggacatcacgctgaaggccggcagacctgccgccttacggcgtgccagcgcttctaccaccacgcccggcgcggatttcggttgatgagggttttgcaaatcggcaacaatcaacgggtgatctaactgcagttcaccgctggccggcgagtggcagtagcctttttcggtaatggtcaatgacacaatagcgacctgaggctcgcacatttttgccagcacgctttccagaccatcgacctgggcatgcatcgcctctttgaccacgccaacaatgcgggcggtccaggcatccgccgacatttcggcgacggtgtaaagtaaatcctgctgttgcagatcggcgatttgctgctcgccaccgatcaggttcacttcggtatagccccagtcgctgccgtgttctgtcgccagaatatcggcatataccgcctggtgagcgcgatgaaatgcgccaaagcccaaatgaacgatgcgtggaataagacggttgcgatcgtaagctggcagcgtggcgttcgctgttaatagcatatgttccatggtggctctcatatttatgatttctggatccccacggtaagtgggtaccggctggtgaaataaaccatctcatgcaattggtatgatatctttgacttttatcaactaccatacaagaagatgggcgagttatactttcggtatttctgagaataaaagagtgaaaatgccgggctaatggcccggcataatgttatttacggcgatcatcattcggtgcggagtttgtgttttttaaatatattgcccgttacccaccgctttattctgcggcgcgcagtctgcggcgtcattcagcaagctcagatcgcggtcacgcacttcaggcatcagaatggcggaaattaagccaatgatggagtagcacaccagcatcacaacaatgggcatccaggaaccggtcatattgcagaaaataccggccagcaccgggccaaagcctacggcgactaatccccccgcctcttttgaaattgccatgcgggtaaagcggttacgtgagccgaacatttccgccatggtgatattttccagcgcaaacagacccaataccgcgatattatgaatgacgatcagtgacgccatgatggtgctcgcgctatagctcttatccacaataatcgacagcatgggatacgccagaataatggctgaaatattaatgataatatagggtaagcgacgccctactttatctgacagccacccaaggaatgggatagtaataaagccgataacagagctaatcattaacgcatcggtagggatagctttatcaaacagtaatgtttgaaccagatagcccgcgaggaaagtttgcaacaatcctgaatttcccgcctgtccgaagcgcagacccgtcgccagccagaaggacttacttttcagcatggcgctaaaggttccttcctgggtcgctatctctttctgcaggacgctgtcttcgctcactttctcaaaaaccgggctctctttcagattgagacgcagccagatggcaaagatcatcaccactacgcttgccaggaacggcacacgccatccccacgcgacgagctgttcacggtccagcacgaagaacatcaccgcccagatagccgtggcgcttaacgtaccgcagttggtgcccatagccaccagcgaagagataattccacgcttacctttcggcgcatattccgccagcatggtacccgcacctgatatttcggccccggcacccaacccctgaataatacgtaaagtcacaagcaacaccggcgctaaaataccgacctgggcataggttggcagcacgccaataagcgtggtacagatccccatcatggtgatggtaataaacagaaccttcttgcgcccaatactgtcgcccattttaccaaaaataaaggcgccgacgatccgcgcaatatagcccgcgccgtaggttcccattgccagaatcagcgccatggcggcggattgctccgggaaaaaaatctcatggaaaaccagcgctgcgccaagggaatagagttggaaatccataaactccagtgccgtgcctaaccaaccagatacggctgcacgaatgagatcggaagtggttctctcattttttacggtagtcataatgattatctctaattgtagaatacagagtccgcacctgttgttattggctgaaggttaataaaaccttacagcaacgtttcctgtcattttcaaaaagctccagtgcatcgataacatgttgataagcaaattgatgagtaatcagctcctccgggttaattaagccttgttccagccactttatgaccaccgggaatttattggcgttaagacgcgacgagaaaatagagagctccttgccggtaataccctgctgtgcaacctgcgaaggctccgtcgagaatcccattaaaacaattctcgccgccggagaagccagggtgaccgcctcttgtagaatcgagggatgacaggccgcatcgataatcagcgtcggtagtaccccctccgccttcagcgtatccgtcagaggcacgacgctgttattaatcacccaatccgcgccgttacgctgggccatctccaggcgttcatcaatgcgatcgaccacgatgacctgcttaacgcgatacacccgcttcagcacctgaatggtcgtcaggcccattggcccggcgccgtagaccagcgcgatatcctggtcggttggcgaaacgtgcccggtaacgttggccgcgatagtgaagggctcaatcatcaccgcatgtctgtccgtcacgttgttcggaacctgccaggcatttttcgccggcaccaccgcgtactcgctaaaaccgccatcccgatgcacgccgagcaccaccaaagaggtgcagacgtttggtttgcccaccgagcaaggatagcaatggccgcagctgatgaccggatcaacgctgacccgctggccgatggctttgtcggtaaccccttctccgatggcgtcgataacgccaaaaaattcatggccaataacgcgcgggtatttggcaaacggattgtggccgcgataaatatggctatcggaaccgcatatccccgccagcttaatttttacccgcacttcgcccgcggcaggctgcgggatcggacgctcttcaatcaccagttcgttgggctggcgaatcacgatacttttcattttgacttccttctttaccagttccacaacgtgccgtcttccagacgcgctacaggcaaataggccggttcataggggtatttcgcggccagtttttcatcgaactcaattcccagccccggtttttcacccggatgcatatagccgttatcaaacgtccagctgtgcgggaagacttccagcatctgttcggaatagcccatatattcctggacgccaaaattcggcacccacaggtcgaagtgcagcgcggccgccatgcagaccggagaaagatcggacggcccgtgtgaaccggtgcgtacctgataaagcgaggcaaaatcggcgatccgacgcatccccgtaatcccgcctgcgtgggtaatggtggtgcggatatagtcaatcagctgctcttcgatcagctgtttacaatcccagatgctgttgaagacttctccgacggcaatcggcgtgacggtatgctgacgaattaaacggaaacatgcctgattctccgccggggtcggatcctccatccagaacaggcggtaatcttcaatactcttgccaaaacgcgccgcttcaatcggcgtcaggcgatgatgcatgtcgtgcagcagatgctcgttaaagccaaatttttcgcgtaccgcggcaaacagctgtggcgtaaaatcgagatacttctcggtagaccacagctgctcttccggccactggcctttggttgccggctcgtaggcctgccctttacctttcgccatcccgtaggtggttttcatccccggcacgccgcactgcacgcgaatcgctttaaaccccatctctttgtggcgcgcgtagtcatccagcacttcatcgatggagtgacccgtggtgtggcagtagaccatcacgccttcgcgcgaagccccgcccagcagctggtatagcggcatgcctgcggctttcgccttgatatcccagagcgccatatcgatagcggaaatcgccgacatcgtgaccggaccacgacgccagtaggcgcccttgtagaaaaactgccagatatcttcgatgcgatgcgcgtcgcggccaatcagctgcggacagagatgatcccgcagataggacgcaacggacagctcgcgaccgtttagcgtcgcgtcacctaacccgacgatcccgtcatcagtggtgactttaagggtgacgaagttgcgccccggacaggtgacgaaaacttcagcggcaacgatcttcatttctcattccttacttctgtgcggttagtgggtaaaagtaaaccatcagacctactaccatacaagtataacgatcgaaaaagacgcggcagatcacagtatctcatcggggataaaagcggcgtgaacagagaaagcgagcgagaaggcaggaagagatgggccgggacagcatcacctggcccggctcactcagtaaaagaggctatgcgcgtccccagccggccacaataatcagcatgccgcacagcgcaaccagcgcgccggcccaatcatagtggctgagtctgacgccatcgataaagcgcagccacagcagcgcagtacacacgtacaccccaccgtaagcggcataaacccgtccgcttgcctcggggtgcagcgtcagaagccagacaaaaagcgccagcgccagggccgtcggcatcagcagccagggcgtcgccccgcgttttaaccagagccagggtaaatagcagccaatgatttcgcacagggcggtagcaaagaaaagcagcgtggtttttaacatgcaaagcgtcgtaagttgaacaagcgttaacgcattctacgcaataatggccgtcgtttactctgttttgtcgggtatgccgtcgaaaggagatgtagtaaactcaatccaagggaatcgcttaaaggaaatcgtgatgaacacaacactgaacaaacgctggtgcctgactgccctgctggcgctgagcgcggtggtctttaccgcatcgtcattcgccaaaacggacaagctggtcatcgaatccggcgacagcgcccagagccgccagcaggccgccatggaaaaagagcagtggaatgacacccgcactttacgccagaaggtcaacaagcgcgccgaaaaagagtgggataaagccgacgtggcttttgacgcccaggacaactgccagaagagcgcgaacgtcaacgcgtactgggagcccaacaccctgcgctgccttgaccgccgcaccggtcgcaccattaccccgtaatgaatggcgcccgcacgggcgccacaatcaccaaaacttcgctataacacacaggtactcccatgactgacgcttatcacgtcaaactccgcccgcttgagcgcgaagatcttcgctttgtccaccagctcgacaacaacgccagcgttatgcgctactggtttgaagagccctatgaagcctttgttgagctttccgacctgtacgacaaacacattcacgatcagagcgaacgccgctttgtcattgaatgcgacggcgaaaaggccggactggttgagctggttgaaatcaaccacgtgcaccgccgcgccgagtttcagatcattatctctcccgattatcagggaaaaggtctggccacccgcgccgctaagctcgcgatggactacggctttatggtgctcaacctgtataagctctacctcatcgtcgataaagaaaatgaaaaagcgatccacatctaccgcaagctcggatttatggtggaaggcgagctgattcatgaattctttattaacggcgaataccgcaataccatccgcatgtgcctgttccagcaccagtatctggccgagcataaaccgcagggccagacgctgctgaaaccgacggctcagtaatagtcaatagtgcttttgatggtgtagtggcgggttaacgcaggctgcacgctgtcgtcgacaaccttaagctcgcagcttaccgggttgtcgtgactgtcgtaatcgcaggtctggcttacgttgcccagcgcgcggtcattgaaggtgctcactgcggtgtagtccatttttttgcgcggatcggatgacggcgttgaggccaccgtaaattgttcacctttggctatggtggttttgcccagcggatagccttctctatcgtagcggtacgtcgctgtactctccttgccgcgagcggtgacgacaaacccgttatcatcggtttcccaggagacccccgccgagggcatttccgccagctgacatttgccttgtaaacgcaggcgcttttcgtggctttgcgcatccaggtagtagttagcgtccagcaccaacgccgcgccggttttattctcccgatcctcaaatgccagcaggtcaaaacacccttcgctggataaacgccctttaacccacttcaccacctgatcgtgttcgtcatacagcgtctggctaaacgctttcaccggcccgcgcagcggatcgaactcaaattcgttagaaaagctggccatttccggggtgaaggcctgcggcgcgcccttttcatcgcaggcgctaagcgccccgacagccagtaacagcaacaaccgttttttcacgcgcgattccttttgtgcatagttcaatcatattagcaaatacaattgtttacaccacttctgctatgcttaagtctggataacgttaataaggagtttatgatgaaactatcaccctggctatgtgcggctctgcttctgggttcgaccgctgctttcgcggcgccggattcctgcgagcgggtaaaaagcgatattcagcaaaaaatcatcaacaacggcgtcccggaatcgggcttcagcctgacgatagtcccgaacgaccagcccgatcagcccggcgcacaggttgtcggccactgcgccaacgacacctttaaaatcatctatacccgcgacagcggtgcgcagtaacctcgccgaatgtctggagaagtcttatccctcggttgaccagggataagatctctctactccattttaagtatcattcctcactctccacgccgaccttacgaaggcgttggcattacgccattataacaaaatcatggagtgagcaatgtctaaccaggaacataccgacggccttacccgtcgaacgctaatcaaatcaaccgcccttggctcgctggctctcgccgccggcggtttatcgctgcctttcagcctgagtcacgccgctgccgcggtgcaagacgccgctcgcggcgaggagcgtatcgtctggggcgcctgttcggtcaactgcggcagccgctgcgccctgcgttcacacgtgcgtgacgatgaagtcgtctgggtcgaaaccgacaataccggcgcggatatttatggcgatcatcaggtgcgcgcctgcctgcgcggccgatccatccgccgccgcattaatcatcccgaccgccttaactatcccatgaagcgcgtcggcaaacgcggcgaaggcaagtttgtccgcattagctgggaggaggcgctggatacgatcgccgacaatctcaaacgcatcgtcaaagagtatggcaacgaagcggtttatattaactactcctccgggattgtcggcggcaatatcacccgctcctccccttacgcctcgctggtcgcgcgtctgatgaactgctacggcggttttttaagccactacggtacctacagtaccgcgcagatttcctgcgcgatgccgtatacctacggcagcaacgacggcaacagcacctccgatatcgaaaacagcaagctggtggtgatgttcggcaataacccggcggaaacccgcatgagcggcggcgggatcacttactatttagaacaggcgcgagagcgctctaacgcgcgaatgatcgttatcgacccgcgctacacggacaccgccgccgggcgggaggatgagtggatcccgattcgccccggcactgacgccgcgctggtggcgggcatcgcctgggtgctgattaatgaaaatctggtcgatcaggcgttcctcgatacgtactgcgtcggctacgatgaaaaaacgctgccggcagatgccccgaagaacgggcattacaaagcgtatattcttggacagggcgatgacggcgtggcgaaaacgccgcaatgggcctcgcggatcaccggcattcccgtcgaccgcatcatcaagctggccagggaaatcggcagcaccaggccggcttacatttgccagggatggggtccgcagcgccaggctaacggcgaactgacctcccgggcgatcgccatgctgcctattttgaccggcaacgtcggcatcaacggcggcaacagcggcgcgcgcgagtcaacttacactatcaccatcgaacgcatgccgctgccggaaaacccggtgaaaacccagatctcctgctttagctggaccgacgccatcgatcgcggcgcggaaatgaccgccacccgcgacggcgtgcgtggcaaagagaagctggacgtaccgattaaattcatctggaactacgccggcaataccatcattaaccagcactccgatatcaataagacccacgagatcctgcgggacgaaagcaagtgcgagacgatcgtggttatcgaaaactttatgacctcctcggccaaatacgccgatatcctgctgccggatctgatgaccgtcgagcaggaagacattattcccaacgactacgccggcaatatgggctatctcatctttattcagccggtcacctccgctaaattcgagcgcaaacctatctactggatcctcagcgaagtggcaaaacggcttggcgaggatgtccaccagaagtttaccgaaggccgtacccaggagcagtggctgcagcatttgtacgcgaaaatgctggcgaaagacccggcgctcccgagctacgatgaactgaaaaagatggggatttacaagcgtaaagaccccaacggtcactttgtggcctaccgcgacttccgcaaagacccggtcgccaacccgctaaaaaccccgtcgggtaaaatcgagatctactccagccgtctggcggatatcgccgccaaatggcagctggaaaaagacgaaaccatcagtccattaccggtatatgcttctactttcgaaggctgggacgatcctctgcgcgagaaattcccgctgcaaatgttcggcttccactataaagcgcgtacccactccagctacggcaatgtggatgtcctgcaggcggcctgtcgtcaggaggtgtggctaaatccgctggacgccgaaaagcgcgggattaagaacggcgatatggtgcgcgtattcaacgcccgcggcgagctgcgcattccggctaaggtgaccccgcgcatcatgcccggcgtgtcggcaatgggccagggcgcctggcatgacgccaacatgaatggcgatcgtatcgatcgcggatcctgtattaatacgctgacgacgcaccgcccttcgccgctggctaaaggcaatccgcagcacaccaatctggtcgaaatcgagaaggtttaaggagtaaaccatgagcgctcagtatggattttttatcgattccgcccgctgcaccggctgtaaaacctgcgagctggcctgcaaggattataaaaacctcacgcctgacgtgagctttcgccgcatctacgaatacgcgggcggcgactggcaggaggacaacggcgtgtggcagcaaaacgtcttcgcctattacctgtccatcgcctgcaaccactgcgaagacccggcctgcacaaaagtgtgccccagcggcgccatgcacaagcgcgatgacggctttgtggtggtgaatgaagcggtgtgcatcggctgtcgttactgccacatggcctgcccgtacggcgcgccgcagtacaacgcggcaaagggccatatgaccaaatgcgacggctgctatgaccgggtcgccgagggtaaaaagccgatttgcgtcgagtcctgcccgctgcgggcgctcgactttggccccatcgaagaactgcgtgaaaagcacggtcagcttgccgccgtcgccccgctgccttctgcgcacttcaccaggccgagtatcgcgatcaaaccgaacgccaacgcgcgtccgtgcggcgataccaccggctatctggccaatccgaaggaggtgtaaaatgggaaatggatggcatgaatggccgctggtgctgtttacggtgctggggcaaagcgtcgcaggggcgattatcgtcagcgggctcggctggctttcgctgaataataactccgaagcccggcagcgcctggtgcgctgcatgttttttatctggctggtcatggggattggctttctggcgtcgattatccacctcggctcgccgctgcgggcatttaactctcttacccgggtcggcgcatcggcgttaagtaatgaaatcgccagcggcgcgctgtttttcgccgtcggaggagtctggtggctgctgacgtttctcggcaaaatgccggcaatcctggccaaggcctggcttctgctcaccatgctgctcggctgcctgttcgtcctcgagatgaccctggtctatcaaattaataccgtgccgacctggtataatgcctacaccaccgccgccttcttcctgacgatggtgctgtgcgggccgcttttcgccgccctgttgctgcgggtagccaacgtgccttttaacggcacggtcttcgcgtcgatgagcgtcctcgcgctgctggcaagcctggccgtggtcattttgcagaacagcgaactggcggagatccgcagttccgtgcagcaggccagcgccctgctgccaaactacggctggctacaaatcctgcgtttagcatttttgacgctgggccttggctgctggatctgcccgctggcaagaaagaaaaacccgcgcatcgccagcctgctgctcggactgatactggtattactcggcgagtttatcggtcgcggcctgttttatggcctacatatgaccgtcggtacggcgattgccggttaatgaatgggtgccgcggcaccctctgcagtaaggaatagatatgatgcaatcgcaagaccgcgatgccgtcgtactcagcgcccgtacgctgggggcgttgttctcttatgctccgggcagcgagcaggctgctccgctggttgccgccctgcgcgacggcagctggcaaagtcagtggccctggccggtcgcgaacggcctggcggcgcagttcgctctcgaagacgatgaaccgctggcggacgcctggcagcggctgttcatcggcccgtgggcgctgcctgcgccgccgtggggctccgtctggctggataaagaaagcgtgctgtttggcgactctacgctggcgctgcgcgagtggatgcgggctaacggcatcggtttgtctgagcaacgcgctgaaccggaagaccacttcggtacgctgctgctgctggcggcctggctttgtgaatccggtcaggatgaggcatttaaccagcttctggcctggcatcttctcccgtggtcgggccgttttctgagcgtgtttattgccggggcgggaaaccctttttatcaggctcttggtcagctggcgcaagaaacgctggcgcgatggcaggcgcggctgccctgcgcggtcgcggataagccgctctaccgctaatgccctgacgttatgcccgcccgccgggcataacgcacttcgtgacaacgtcacatttaatctctttcgcacttatcgcttttgcgtctatgcttattcccggtaaaaataagccccatttcccgttaaccgaattcgctgatgcatcgtcttcacgcttatcctgatgttcaggttatgtttcgccgcatggttatcgccatgctggtcggcgtcctcgccgcgctcgcggttgccctgtttcgccatgcgatgaccggtctggaaagcctgtttctgagcaatgacagcggaagcctggtgaacgccgccgagtcgttgccaccatggcgtcggttgctgacgcccgcgcttggcggccttgcggctggtgccctgctctggctctggcagcgccgcacccttgcgcggccccgtgcgccaaccgactatatggaagcgctcgagaccggcgacggcgtgtttgatacgccagccagcctggtaaaatcgctggcctctctgctggtggtgacgaccggcagcgccatcggtcgcgagggggcgatgatcctgctggcggcgctggccgcgtcgctgttcgcccgccgctttacgccaaaagaagagtggaagctatgggtagcctgcggcgccgccgccgggatggccagcgcttaccacgctccgctggccgggagcctgtttatcgccgagatcttattcggtaccctgatgctggcgtcgcttggcccggtggtgattgccgcggtggtggccctgctgctgaccaatctgctgaacggcgattcggctccgctgtatcacgttgaattccacgaaaccctgagcgcgacgcactatgcgctgatgctggcgacggcgctgctggccgggctttgcgggccgctgtttatctggctgatgagctatagccaccggtgctttgtccggctgcacctgtcgcccccgtggcagctggcgctgggcggccttatcgtcggtctgctgtcgctgctcgcgccggccgtctggggaaatggctatagcgttgtgcaaagctatcttctttcgccgccgctcttcagcgccatgattgtggtgtttgtctgcaagctgctcgccgtgctggccagcagcggttccggcgcgccgggcggcgtttttaccccaacgctgtttgttgggctggggatcggcatgctgttcgccagcctgaccgggctatggctacctgattaccaggctatcgcgatagtggttggcttaaccggcatggcggcgtttctggcagccaccacccacgcgccgattatgtccacgctgatgatttgtgaaatgaccggacaatacgttttactgcccggtttactgattgccagcgtactggcgtcggtgctgtcgcggacgttacgccgggattctatctaccgccatcacctcgccgagtatcgataagtcgatatactggctcagttcacgctgctccgcgcgcggtaagtaaggcagttcaccgatcagcggcgccggcagctttttgctcagcacctcgatgatttcagcataatgcgccaggcctgggttaatccggttggccacccagccgatcagcggcaggccgtcgttggcaatcgcctgcgcggtcagcagagcatgattgatacagccttcctgaatgccgacgaccattaacaccggcagctgttcctgcaccacccattccgaaagcggacgcaggtcgttcatcaggctgcgccagccgccggtaccttcaaccaccacatgttcaacctggccgctgaggcgctggagaccatccgacagcagtccgtagttgatcgggcaactgtgcgccacgctgctttcatcttcgcttaacgcgatgggattgacagcttcatacggtaacaccagcgatgacacgctctgtaagaccagcgcatctttgttccgcagtccgtccggcgtctctttactgcccttcgccacaggcttgtacccggcgacgcttttgccgctggcagccagtgcctgcaacagcgcacgggaaaccaccgtcttgccgacagcggtgtcagtacctgttatgaagaaacgcttaaacatcactaaccccacagttatgttgatgaaatatacgggagagaaataatcaactgtggaaaaagtctacgcgatgctgccggaagccagcttgagatagcgcaatttttggtgtgaatatgaaaaaatgttaaccctgtaacagtcgtatcagcagcgatccgttatagagggcatcctttaccagggccgcgccagccatcgttccccggttagaaaactgggtgctttccacggcaatatgtcggctataggctggtaacgattgttgtcgaatacaatcagatattgccggaaacaggatatccgcggcaagattgaagggagagccgataaggattttctgcgggttaaagaggttaaccataatcgccagaatccgtccaacgtggttcccgacgccgctgataatgtcccgcgccagtaaatccccctgcagcgcggcctgacatagccattcaacgctcagcggctgctgatgcagcattgagctcatcgacttcgccatgcggatctgcgccagttccagcacactctccacgctggcaatggtttccagacagccatggttaccgcaatagcagcgtttaccatacgggtcgacctgggtgtggccgatttcgaccagactgctgctgcccgcgtgcagcagacgaccgtcggtgatcacgcccgcgccaacgttatggtcgatcaccacctgaatcacatctcgcgctccccgggaggcgccaaacagcgattcggccatggtccaggcgctgatatcgtgctgaatataaaccgatacgccggtatgattggctaagatttcgcccagcggcatgtctttaacgtcttcataaaacggcatccggtggatgattccgtgctcggtatcgatgatccccggcatggtgacggcgatggcggttaaacgctccagcttcttttggtgacgaataaagaactggtcaacctgatcgagcagccggctcgcgaagggctgaacgtgctgtaacgccagttccagctgctcttccaccaccagcgcgctgcttaaatcccgtagcgcgaggtggatctcgccgcggctgatgcggatagagaggtagtgccaggcttcggtttccaccatcaagccaacggcaggccttccccggctccctggctcctggatctccgtctcctggaccagatgcgcttccagcatttcgcggacgattttggtgatgctggcaggggccagctgcgcgaagcgcgagaggtcgatgcgcgacaccgggccaagctgatcaatcaggcgataaaccgcgcccgcgttggtctgcttaatttgatcgatatggcctggctgactgtccgctaccaccgttgactccctttattttcgcgcttcgaaataaactgatggctatggtgaagcacttcaacggtactcgtcaaatttttgcttagccttgtgatttaccgcacatttttagccgttatttgtcctaaatgtctcatgtggcgctggcaagcagcgattcacgaaaacgccgggccgcttgcccctgttcgtgatgcttcgaccacaccagccacatttccgacaccgcgtcctgctcttcgatcggcagccagcacatttccaacagctggacccgcctgaaggacgccggtaaaatcgacacgccaagcccggcggccaccaggccgataatcgtcattgcctcccccacctcctgggtgatggctggcgtcaggtcgtagcggcgcatcaagcccagaatgtcgtcatacagcccggtacccacatggggatcgaaaaacacgaacggctcccgcgccagttcccgcaggcttacgcgcggctggctggccagcggatgatcgcggggtaccatcgccagcagcggttcgcgcagcactctttcccaggccagggtatccggcagctgggtattacgcatcagtcccagatccagcgcgccttcgttcagcggcacaatctgctcgcgcgtgttggtttcccgcgtctgaatatgcacatcgggatagcggcggcgaaaggtcgacagcgtgtcggaaaccgccttgataaagggggccgatgaggtaaagccaatgcgcagctcgccggtttcgccgtggtgaagccgagccgcgcgcgcggcagcatcatcgacctgcgagaggatctgccggctatcggcgagaaactgccttccggcttcggtcaggctgacgctgcgattagtacgagcaaacagacgcgcgccaatttgctgttcaaggatttgaatctgctggctaagcggcggctgagagatatttaaccgcgccgccgcatggccaaaatggagctcttccgccacggcaataaaatagcgcagatggcgcagttcaatattcatatttaaaacgtcttatttgagattattaatatattagacagaatatttacattttcataccctgaataagtggccattgcggtcacttaactctctgtatatcagcaaggatttttccgtgagtcgtacaactaccgttgacaccgccccggcaaacgacgtcagcgacatcatcgctcctcagccaaaccagtttatcaaacgcggtactccgcaatttattcgcgtcactctcgccctcttttctgccggactggcgacgttcgcgctgctttattgcgtccagccgatcctcccggtgctttccagtgaattcggcgtctcgccggccagcagcagtatctcgctgtcgatttccacggcgatgctggcggtcggcctgctgtttaccggtccgctgtccgacgctattggccgcaaacaggtgatggttaccgcgctggtgctggcctcctgctgctcactgctgtcgacgatgatgtccagctggcatgggatcctgatgatgcgcgccctgatcggcctgtcgctgagcggcgtggcggcggtcggcatgacctatctgagcgaagagattcaccccagcgtggtggcgttctcaatgggtctttatatcagcggaaactccattggcggcatgagcggccgtctgctgacgggggtatttaccgatttcttcggctggcggatagcgctggcggtcattagcggcttcgcgctggcggccgcgctgatgttctggcgcatcctgccggaatcgcgccacttccgtccaacctcgctgcggccaaaatcgctgctgatcaacttccgcctgcactggcgcgatcgcgggctgccgctgctgtttcttgagggtttcttgttaatggggtcattcgtgacgctgtttaactatatcggttaccgcctgatgctttcgccgtggtccctcagccaggcggtcgttggcctgctatcggtggcctatttgaccggtacctggagttcgccgaaagccggggccatgaccgttcgctacggccgcggcccggtgctgctgttctcgactgcggtgatgctcggtggcctgctgctgaccctgttctcgtcgctgtggctgatttttatcggcatgctgctgttttccgcgggttttttcgcggcccactcggtggccagcagctggattggcccgcgcgcgcgtcgtgcccgcggccaggcgtcatcgctctatttattcagctactatctgggttccagtatggcggggacgttaggcggcgtattctggcataactacggctggaacggcgtaggtgggtttatcgcgctgatgctgctggcggcgctgctcaccggcgcgtgtctacacaagcgactgaaataacgcagattaacgtggcctgaaacgggccacgctcttcaccacatccccagtaccgacgacattcccaacagttctctaacggcatcgacggaaagcagtgctataaacagccaggtaaacggattcataatccacctcgcatcggcggcccgtgcctgcattaagtttagccgtagttcagagaaagcgtctgctactttacgcacatctggattatttcgagccaaacataaaatacgcaatcgattaatcactacattatgctgatgcttgcgtcgagcgggcgagccgacgctgtgggcaatttcccattaacgtcggggtgatttatgtcgaaagcgcccgcatccctcgaccccaccggcggatcgcgatagtgtaggcccacgaaaaagcttttgttcacttgccaccgtcagagtgtaaacatgaccgaaaataaaaattatcatcagcttacccgcaccttccagcgactctcccgcttctcgcatctttccgccatcgccggctgggatatgttcgccatgatgccccccggcggcagcgcggcccgcggcgaagcgctggccgagcttggcgttttgcagcatcagatcctgaccgataaaaaagtgggtgaatggctgcagaatgcgcttcaggaagagctaaatgatgtggaacaggccaacctgcgcgaaatgacccgtcagtacgaacaggcggcgctgctgccggaaagcctggtggaagcgaaatcgctggcgggtagccgctgcgagcacgcctggcgcagccagcgtccggcgaacgactggcagggttttgccgagaacctgcgtgacgtcgtcaaactgagtcgcgaagaggcgcagattcgggctgcggcaaaaggcggttcccgctacgacgcgctgctggatatttttgaacccgatatgaccagcgcccgtcttgacgtactgttcgcggatctgaaatcctggcttccttcgctgctggagaaggtggttgagaagcaggcgcaaacgccgctcatcgaacctcaagggccgtttccgattgccgaccagcgcgaactggggctggaggcgatgcgcgtgctgggatttgattttgacggcggacgtctggatatcagcgcccacccgttctgtggcggcgtgccccaggacgtccgtatcaccacgcgctacaacgaaaacgacctgctcagcgcgctgtttggcgtcattcacgaaaccggccacgcgcgctatgaacaaaacctgccgcgcaactggctcgatcagcccattgccctcgcccgctccacggcgatccatgaatcgcaaagcctgtttttcgagatgcagcttggccgtagcgacgccttcctgcagcgcctgctgccaacggtacgccagtactttggtgaacagccggcctttagccgcgaaaacttcatcgcttggaaccagcgcgtcaaaccgggctttatccgcgtcgacgctgacgaagtgagctatccggcacacgttattctgcgctacgaaattgaacgcgcgctgattgatggcgatattgaggtcgaggatattccggcgctgtgggatgaaaaaatgcagcactggctgggactttccaccctcggcaactatcgcgacggctgtatgcaggatatccactggaccgacggcggttttggctatttcccttcctacacgcttggcgcgatgtacgccgctcagctgatggcttccgccagacgggcgctaccgcagctggaaagcgatatcgccaacggtaacttcagcgccctgtttgactggctgcggcaaaatatctggcagcacggtagccgttttaccacctcgcagctgattcagcatgcaaccggagaagaccttaacagcgactatttccgccagcaccttacctcgcgttatctgtaaatcaccggcgtcgggccgcgcccgacgccgtgtcccatcgttgtagcagcgcgttgtacatatggttacacgccgataccaaacactcacggaaacctcgataagacaggcatatagttctttcaacggccccgcagtggggttgaaacaagaaaccttttcgaggatatcagaatgaaaaaagtattagctctggtcgttgccgctgcaatgggtctgtcttctgttgctttcgctgccgatgctgccaccaccacgactccggcgccggctgctgcaactcacagcaccaccgctaaagcgacccaccataagaaacaccataccgccgctgcgaaaccagctgctgagcagaaagcgcaggctgcgaaaaagcacaaaaaagcagccgctaaacccgctgccacccagaaagcgcaggcagctaaaaagcacaaaaaagcagaagctaaaccggctgccacccagaaagctcaggccgctaagaaacacaaaaaagccgctgctaaaccggtagctcagaaagcacaggcagcgaaaaaacaccacaaaaccaccaaacatcataccgctaaaccagctgcacaaccggctgcttaatctcccgggttaagcgatgtgatatgatatcggcgctggcttcagcgccgtttttttctggagagcaccatgctgcggcgctatcgttttgagctcatcctgatcctgctgattatctgcgcgctggtcgccagccgtttttttctttactaaacctattgctgccacaggttgtcgccgagaccgtcgtcaaacgtttgacgtaacgcgccgttagccaacgacgaaccgccagaatatcaagcgaaagcacgctccggtcgatacgcacccacaccgccgtcaacagccccagacagcagccgataccgtcggcgatatgaatacactgcggaaaaaagagaatatcgttggggtcgcttaatgcggtcgccaaacctgccatcaccccgctacgctttgttgccacctgctgcgcaacggcaccttcacgcaatattgccggcagcgttagcgcccggaagagaaaaagtaagggacggagattttgctgacgagaacaccggcggcctgtccggggatttatctatcaatcaaacgccggaacgggcggcgctggccgcaaagcgcgctcagcccgccgcttaaacctgcctggttccgccacgatgaggccgcggattaaagaacgtgaaccgccgtcaccagcagatagcccgtcgcgccccaaatcattgctgataccagcgaaacgtaaaccaatgcgcgaataccttgtttagacataaatcctcccgtatatcgggtgtttgacattgcagatatcatcgccgggataacatctctgtttgctcaacaaggtgatagcaataacaacgttttcggtgagaaaatgtttcgctttgaaagtaattgataaacaggtaaagaagtccgattttcctgtgaagatatctctttttttgcgtgatattggccgttttcgccattaactgccttgagaaaaagctgaaccgaaaatcctttattcgccccccgccggttgtacgttcggatacacgatttatgttgcttccgttgcccttttctgcggaaataacgccgcaggaaaatggcgttaacatattgaattcacgccattcatccgtaagcgactggcgttttttgctgatttcgcctgccgcctggcttaattaaaattattcttaactttcataaacttaaatctgctgctactttcaatatacataattatctccccagagagtgatatgcgtagagacgtcctgttattactgtgttcaatttccctgtttccagcgctggtccaggccgacgatgatggtatgagtgcaaaagatattaagacgctgttttttggtcatgacgaccgaaaaccggtcagcaaccccacggacgatccctgggatgcgattgggcaactggaaaccgccagcggtaatctctgtaccgccacgcttatcgcccccaatctggcgctcaccgccgggcactgcctgctcacgccgcccaaaggcaaaccggataaacccgtcgcgctgcgttttatctcgcgtaaaggcggctgggtgtacgaaattcacggtattgaaggccgcgtagacccttcgctggggaaacggcttaaggcggacggcgatggctggatagttcccagcgccgcggcgccgtgggattttggccttatcgtgctgcgctacgccccttccggcattacgccggtgccgatttttagcggcagcaaagccgatctgaccgccgcgctaaaaaccgcagaacgaaaagtgactcagtctggctatccggaagatcatctggataatctctatacccaccaggattgcgtagtcaccggctgggcgcagacatcggtgctctctcatcagtgcgatacgctgccgggggatagcggctcgccgctgctgctgaaaaccgacgacggctggcaggtgattgcggtgcagagttcggcgcctggaccaaaagatcgctggcgggcggacaaccgcgccatctccgtcaccggctttcgcgataagcttgaagcgctggctgcccagtaagcggtcagccttgctgctggcgcagctgcaataacgacgcgacgggcatcggctcgctgaagaagaaaccctgcaatctgtcgcatcccgcccgccgcagcagcgccagctgttgctgattctcaacgccctccgccaccaccgtgatgcctaacgctccggcaatacggacggtcccgcgcaccagctccgccgcctgggtatccacatccaccagcccggccagggatttgtcgattttaagactgtcgaagctgaagctgcgtaaatagccgatgctggaatagccggtgccaaaatcatcgagcgccaccgcgatgccaagcgcccttaagttctcaatggccgacttcgcccgctcgggattctccagcacgtagctctccgtgacttcgagctgtaaccgacgggccgggaaatgacagcggcccagcgcctgcaccacccgcgactcaaactccggatcgcggaactgcgccggggagatattcaccgacagcagcagatcgtccagtggctgcagttcgctacaggcgcgttcaagcacaaactggccaagcgcgtagatcaaaccgctactttcggcgataccgataaacgcatccggcggcagcgccccctgaggacgccgaggccagcgcagcagcgcttccacgccttccataaccagcgtatcggcgttgacgatcggctgataccagacatcaaactcttcgttctccagtccctgacgaatgccattttcgatattcagctgatactgccgcgcgtcgctgagcgcttcgtcataccaggtcgtgcgccctttgccggtttttttcgagtggtacatggcaatatcggcgcggcgaaaaagctcggtgctggagcagcttgccgggaggccgctggcgataccgatactggcgctgatataaatttttcgctcgttgaggataacgggcgcttttaacagttccagtaccgcccaggcaaaagccagcgcctgatttaccgcctgttcgccgcttaccgtcatcgcgaactcatcgccgcccatacgcgccagcatcccttcaggcggaacgcgctcccgaagttctttagcgatatgaataatcagcgcatcgccaacgtcatggccgtagttatcattaacatccttaaagccgtcgagatcgataaataccacgctttgcatttggtattgggaggtatcgcacacctggttaaggcgttcgatcagcgcccgtcggtttggcaggcggctcagccagtcggtcatggcactgtcgcgcgccagcttttcgccgcgcgccagcttgtaaagcccgaggtagctgaagagaataaacagcaggatcagcccagccgccacggcggcaatcagccgcatactgtcggaggccgcccgcgcggcttccgcgccgggaagccccggctgccagctcaggtaacccacgatctccccggcctgggtgcgcagcggaatactgtattctccgccgcctggcgtgacgtgcaggttgcgaatctgaaacgtgtcgcccaggcgctcaagcatttgcgagttgatatggcgggtgatcaccagatagcgacgcgtatcatcatgcacctgtagccgccctgccgtcgggcgaatcaggccaataccaataaacgcaataccggcgcgggttcgcgtgatgccggcataagcgcttttaccgctgcgcagcgcggcggcatgctgcgagataagcgaacgaaaaccgttgccgaggaattgggtatcctgctcggtaaagctctcactgcgaaacgatccccacagcacccgatagtgctggtcgagtacgaaagtgccgtcatagagattattgattttaaaacccgatccccatgagttgtagagccattgcggatcgagcctatcggtataggtctgatgcaccgcatcatcccagatagcgttatccatcaccagcgacagcacgcggttcaccgaggtctgcaccgccccgtccaccgatagcacggaacgatgtttatcaatttcgtttgctttcaggccgatcaggtgttgggtgagataaaggagcgaaacaatggacacgattaagccgatcccggcgaggacaatcatgatggacagcgttctggcggagggaatattgcgccagcctggcaaatgaatcatgttctgccctcatatcggccggcagcaaaatacgccgaactggctcttttttaagcgtaatacagagagcagaatttaccgcccgcattcacaggcggcatcatatcaggcgagtttaattaacaccatgccgaccaccagcagaagcagaccggcccagcctttatgattcagccgctggccaaacagcacccagccggcggcaatggtcgccgcgataccgaaaccgccccacagcgcataggccaccgacaggtcaattcctttgaccgcctgcgaaagcgcgctaaaggcgcccaggaccgccgccagcgacataatgccgtagaatttacgtcgaaagccgtcggaaaatttcagaaaaacgttggccaaaatttccagcgcaatcgccagcgccagccaggcggcgtggacccactcaaactgttgcatgcgctttctccttgcccggcttcaccgctttctgcgtccccgatttaatcaagacaatcccggcgaccagggtcaccaggccggcgatttttatcgtcgacagcgtctcatcaaacagcaggacgctgaagatagtgatcagtaaaatgccgatcccctcccagagggcataggccacgccgagggcgatttttttcaccgcgaaagccagaaaaatataagaaagcgcgatcatgaccagcattaaaataaaaccagtatggccgccgcttacgcttgcccatttcatcgacaacgtgccggtaatttcagcaacgatagctaaagctaataaaatccaataaaacatgatcccttctcctgcttgagaatataatccatggcggcttacagagaagtaaaccggaaaaattctgacgttaaattagccgtgcgcagcgcgccagctcaggcagagagaagaagactaaagcgccgagcgccagtgctgctcgccgagaaagcgggagtgagagagggatactgcagggtgaaaagaaatatacatcctgaactgattgtccataaaattacaattatccgcggtattgcttctcgtcatttgcggatcaaaattgtcctctgtagttatacacacgcagatttgtaccataacgccacatttaactcaaagtctttgcagttctttacctctggtatttgatttggattagttttttccgatcgcaatcaccattatgatatcgttccggccattattgattaattggtcgttttttttcatttagcggacgcgacgcgctgagacgccgactttgccaacgtctacaatgactcacattagaccccattttttctctcgcagggagcggtatggccaaacccatcatcacgcttaacggcttaaaaatagtcatcatgctcggcatgctggttatcatcctgacaggcattcgcttcgcggcggatattatcgttccttttgttctggcgatctttctggcggtggtgataaacccgctggttcagctcatggtgcgctgccgggtaccgcgggtgctggctatttcgctcctggtcggcgtgattgtcctgctggccgttgtgctgctggcctcgctcggcacgtcgcttaacgagcttgcgcgcaccctgccgcagtaccgtaattatctctatgaaccgatgcagaccgttgcgccctggctacagcgcttcggctttaccgtgtcggtggtggagctgaataagtatattgaccccaacgcggtgatgacgctggtgaccggcctgctcacccagctttccaacgcgatgtcctctatcttcctgctgctgctgacggtggtctttatgctgctggaagtgccgcagcttcccgcgaagctgcagcagctgatgtcgcggccggtggagggaatgggcgcgattcagcgcgcgctggatagcgtctcccactacctggtgttaaaaaccgccatcagcctggtgaccggcctggtggtctggggaatgctggtgctgctggacgtccgctttgcttttatgtggggactgctggcctttgcgctcaactacattcccaacattggttcggtgctcgcggcgatcccgccgatcctgcaggtgctggtgtttggcggtctgtacgaagcgctggtggtcctggcaggctatctggtgattaacctggtgttcggcaatattcttgaaccgcgcattatgggccgcgggctggggctgtcgacgctggtggtcttcctgtcattgatcttctggggctggctgctgggcccggtgggtatgctactctcggtaccgttgacgattatcgtcaaaatcgccctcgaacagacggtggccgggcaaagtattgcctttctgctgagtgatttgagtaaaaactaacgccattgcgcatgcttccccggaggcgatgctggcgcatctgtccgggctaccggcccgcagacgacccttaacctgtagcccgggcaggcgctttgcgccgcccccgggagcagagcgcggagccgatgaacttccccggaggcgatgcggcgcatctgtccaggctaccggcccgcagacgcccttaactgtagcccgggcaggcgctttgcgccgcccccgggagcagagcgcggagctgatgaacttccccggaggcgatgcggcgcatctgtccaggctaccggcccgcagacgcccttaacctgtagcccggctaaacgcagtgcgagccgggaagccgcgccaatacctcaacccggtacgtcccctgctcgtagaccaatcattcgcaatcattattgatcgtcatcacatctctgccccgtcaatcattactcttacgctaacgattcgccatcggccttaattgatgcccgccacctcgcgacgcacacttacttccacaccaggacaatcaaaacgattcgtcgaatcaggaggttaataatgagtgccgaacaaacgacgggacgcgtctggaaccatcgccgtacggaaaaacagcggcgactgaccgaggcgaaggtctcgggcaaagtgatccccaccgaccagctggtcgccgttcttgagcagctgctggcccccggcgaccgggtggtgctggaaggtaacaaccagaaacaggctgatttcctctcgcggatgctggcggaagttaacccacaaaaaattcacgacctgcatatgattatgccgagcgtcgggcgcagcgagcacctggacctcttcgaaaaaggtatcgcccacaagcttgatttctccttctccggtacccaaagcctgcgtatttcgcagctgctggaagatggcctgctggaaatcggcgctatccacacctacatcgaactttactctcgcctgtacgtcgacctgtcgccaaacgtcgcgctgatcgccggttacaaagccgaccgcaagggcaacctgtacaccgggccgagcaccgaagataccccggcgctggtggaagccgccgcgttccatgacggcatcgttattgcgcaggttaacgaactggtcgatgacgagtgcgatctgccgcgcgtggatatacccggttcgtggattgacttcgtggtcgtcgcggataaaccgttctttatcgagccgctgtttacccgcgatccgcgcctgattaagcaggaacatatcctgatggcgatgatggcgattaaaggcatctacgccgagcatcaggtgcaatccctgaaccacgggatcggctttaacaccgccgccatcgaactgctgctgccgacctacggcgaacagctcggcctgaagggcaaaatctgtaaacactggacgctgaacccgcaccccacccttattccggcaattgaaagcggttgggtcgagagcgtgcactgcttcggcggcgagctgggaatggaagagtacattcgcgcgcgtccggatatcttcttcaccggcgccgacggctccatgcgctccaaccgcgcgttctgccagctggcgggacagtatgcggtagatatgtttatcggctcgaccttacaggttgacggctacgccaactcctcgacggtgacccgcggccgcctctccggcttcggcggcgcgccgaatatgggccacgacccgcacggtcgccgccacgctacgccggcatggctcaacatgatcaccgaaccggatccgatgcagcgcggtaaaaagctggtcgttcagatggtggaaaccttccaggcgggcgtgaaaccgaccttcgtggaaaaactcgacgccgttgaggtcgccaaaacctccggaatgccgctggcgccggtgatgatttacggcgatgacgtcacccacgtgctgaccgaagaaggcatcgcctatctctatcgggcggaaagcctggaagagcgccgggcaatggtggcggccgtggccgggatcaccgatatcgggctcggcgttgacgccaaacgcgtggccgcactgcgccaaagcggcaaagtcgtctatccggaagatatcggtatccgccgcagtgacgccacccgctctctgctcgccgccggcagcgtagccgatctggtggagtggtccgacggtctgtacaacccaccggcaaaattccggagctggtaatgaaaaaactctccccccacgttgctgaaacccgggcccgctggctggcccagaccgccagcgcctgcctggttgacgaagcgcgactcagccccaagccgggcctggtggatagccgcggcaacggcgcgcatcaggacctgaacctggccctgatggagcgttcggcccacagcctgcagccgacgtttcacgcgctggctcagcagagctggcggcgtccggccgacgttgccctgcgggaaaccgttggccggcttggccgcgaaggcgaagcgcggatgatgcaggcgaccgccggggtcaatacccatcgcggcgctatctgggcgctgggcctgctggtcagcgcgacggcgatgctcgggggggagggtcaggcacagagaattacggaaaccgccgccgccctcgcccgtctgccggacgcctgcgcgccaaagaccttcagtaaaggtctgcgcgccagccgccgctggcaggttcccggcgcgcgggaagaagcgcagcgcgcttttccgcacatcaccaccctggcgctgccgcagctattgcgcagccgggccgcgggggccagcgaggatcaggcccggcttgacgcgctgatggcgattatgacctcgcttagcgatacctgcgtgctctcccgcgccggaatggcgggccttgaggcgatgcggcaaggcgcagccgaggtgctggcggcaggaggatgtgcgacagccagggggcgcgccgcgctggcgcgtctcgacgtgcagatgctggcgcagaacgcctcgccgggtggcgcggcggatcttcttgccgccaccctgtttctcgaccgggtttccgcttaacgcattcagaggatgttatggaacagattaaattgtcattccctgccaaccgcgccctcagcggcaaagcgctggcaggcgttgtcggctccggcgatatggaagtgctctataccgccggacagagcgatacgctcaacgtcgaaatcaccacctccgtggacaacagccaggcgcgctggaacgcgctgttcgaacgactgagcctgattaacggcctgcccggcggacagctgatcatccacgatttcggcgccacgcccggcgtcgcgcggatccgtattgaacaggtttttgaggaggtggctcatgcgtaacgatcgcagctttattgaactccgcgcccgtgaacgcgcccgcaccctgctggatgacggcagctatcgcgaactgctggatccctttgacggcattatgtccccgtggctcggcgcgcagggcatcgtcccgcagtccgacgacggtatggtcgtcgcaaaaggcaccattaacggccagccggcggtagtcattgccatcgaaggtaccttccagggcggcagcatgggcgaagtctccggcgcgaaaatggccgccgcccttgagctggcggcggaagataaccgcaacggcattcctacccaggcggttctgtgcctggaaaccggcggcgtgcgcctgcaggaagccaatctgggccttgccgccatcgccgatattcacgccgcgattgtcgacctgcgccgctacaccccggtaatcggcatcgttgccggtaccgtcggctgcttcggcgggatgtccatcgccgcggcgctgtgcagctacctgattgtcacccgtgaagcgcgtctgggcctcaacggaccgcaggttattgaacaggaagcggggattgaagagtacgactcccgcgaccgtccgtttatctggagcatgaccggcggcgaaattcgctacgccagcggtctggtggatgccctggtgggcgatggcatcaacgcggtgaaaagcgcgatgaacgaagccattgccaaaggcgtgcccgcgcagcatcgcagcgacaaatatgaagatttcctgacccgtttgacccatttcgatacccgccagcaggcggataccgcgcagatcaaacagctattcgcccgggaggagaaataatgagccagttcacaaatcgcgccgcgctgtggctaaaccagctggcgccgaacgccccgctaatgaccggtctgtgcccatcggtgcaggttgccgacgccgattttaacggtgaaagcgcccgttttatcgccgtggtgccggatgctaataaccattatccacgcgccgctcagggtgaagtcggcctgctcgaaggctggacgctggccaaagtggtcaacgaaaccatcgacgccgatgccgataacgcggtgaagcgcccgattatcgcggttatcgatgtccccagccaggcctatggccgtcgcgaagaagcgttcggtattcatcaggcgctggcgggcgccgcgggcgcctacgcgaaggcgcggcttgccggacatccggtgattggtctgatcgtcggcaaagcgatgtccggggcgtttctcgcccacggctaccaggccaatcgactgatcgcgtttaacgacgccggcgtgctggtgcacgcgatgggcaaagcgtccgccgcgcgtatcacgctacgtaccgttgaggcgctggagaaactggcggcaaccattccgccgatggcctatgacgtcagcaactacgcaacgctcggcctgctctccgccctgctggatatcagcaatcctgacgcgccggacgcccgcgatctgacgctggtcaccgacaccctgcgcgacgccatcgctgacgcccgccgggatgtctcgctgaagtgccgccttggcgcggagaatcgccgtagttcccaacaggtgcgcgatcgcatgcgcgccagctggtagtcagtccctaagtagaagaaaacctgccggaagcggccgcccggggcgccatcgcgcgccccggaaataaaccgcttttagaaattataacaatcgcgccagtactctattttcatttacaggtgatttatgacttatgtgattattcatgccctcgcgccgatttttgtcatcatgctgctgggcttctgggccggcaaggccaaaatggtcgataacaaaaacgtctctttactcaacatcttcgtgatggacttcgccctgcccgccacgctgttcagcgccacggtgcaaacgccgtggagcggtattgtcgcgcaatcgccgctggtgctggtgctgaccggggcgatgtggattacctatgcggccatctacttcctcgcgacccgcgtcttcaagcgctcgccgcaggatgccgccgtgctgaccctgaccgtcgcgctgcctaactacgccgcgcttggcctgccgattctgggcagcgtgctcggcgaaggcgcctccacctccctctccgtcgccgtttccatcgcctgcggatcggtactgatgacgccgttctgcctgctgattctggaacgtgaaaaagcgctcgccgccggagagaacagcggctcgacgctggcaatgctgccggttctgatgtggcgttcggtgaaaaaaccaattgtctggggtccgctgctgggggtcgtgctttcggccatcggtatcaaaatgccggatctgctgctggcctctatcaaaccgctgggcctggcggcgaccgccgccgcgctgttcctgaccggggtgattctgtcggcgcgtaagctgcagctcaatgcgctgattgccacttccactattgtcaaactgctggtgcagccgtttatcgcctggggtctggtgatgctgctggggctgcacggctctatcgccattaccgccattctgatgattgcgctggcggccggtttctttggcgtggtcttcggcaaccgctttggcgtgcagtcgccggatgcggaagcggtgctgctgttaagctcggttctgtgtattctgtcgctgccgctgtttatcaccttaacgtcaggaatctaacgatgtcatcaacgccgcgtcctcatgatttagtctggttgaataatgccgccgcgctggaggcgattgaggagtcctgggtcgcacagtactggcgtattagcctgccggtggtggtacgacgcgacgttgatgctaacgcccgcattccggtgggcgtacggggtatgaagcgcgagcagcgggccgcaggctgggtacagagggaaaatatcgtccgtaccgtcagcccggaaaccctcgccgatcgccaacagctcctgcgctcgccgtttgtctcccagccgccggtacaggcggcgatatcactgaccttacacccctggccgtggcgctggggcattaccggcagcaccggctacgcgctggccaccgagattccggtgcttcacgccgccagcgatctcgatctgctgatccgcgcgccgcagccgatcgctcgcgaaacgctgctcgcctggcagtcccgcgtcgcgcagctgccctgccgggcggatacccaggtcgaaacgcccgcaggggctttcgcgctaaatgagtggctgcgcgatggccgcgccctgctgaaaacgtcccgcggcgcgcgcctgaccgctgcgccgtggaacagggaggaagcatgaaaattatctttacctttcccggtcagggaaaccagcggccggatatgctcgccgcgcttcccgaccgccagaatatcctcgctgaagcgcgaaccgtgcttggcgatgaagtagaccatttagataccgccgccgcgttaaaacatacccgtgcggtgcagctgtgcctgctgatcgcaggcacagcctgggcgcgggagctgcagcgtcagggagtaaatccggacatggtcagcggcctgtcgataggggctttcccggcggcggtgatggccggcgcgctggatttcaccgacgccctgcggctggtggcgctgcgcggcgatttaatggagcaggcttatcctcacggctacgggctgacggcgattatgggcctgacgctcgaccgcgtggaaaagctgattgccgacagcaacctctatattgccaacctgaacgcggaaacgcagattgtcattgccggacgcgacgacgagatggcccgcgtagcccggctggcgctggcggctggcgccggtaaagcacagcggctggaggtcagcgtaccttcccactgcgcgctgctggatgaaccggcggctaagctggcaaaggcattcactgacgtcacgctgcagcgcccgcgctgcgcctatctgagcggctccacggcgcgcgttttatgggacccgttaagcattgccgacgatttagcgcggaatatggcgcgaaccgtgcgctggcaggaagcgatgatcgccgctgatgaacgggacgcgcggctggcgatcgagatgccgcccggcggcgtactgacctgtctcacccgccaggcgggctggcagggggagtgtattgcgctggagcgcagcggtatcgacgttgcccgtcacctggcgaaccggcttaacggctgaggctgcgggcgtacatccgcccttctgccgccagcgccagcaggtcggcgtcgcgctcacgatggtgtgagtagacaatggagatcagctggcgcatctgatacggctccgccagcttcagcagctgtacgtcgttttcatacacctttttcattcgtcccggcagcagcgcaaagcctacgcccgcctgcaccaggctaatcatcgaaaagatatcgttaacccgggtgacgatttcaggctcgaatccggccacctggaaggcgtcctgaaatccggcataggtggcaaacccttccgccagcgaaacaaacttgcgcctggcgtaatcgcgcagctcggcgggagcggtggtatccagctgttccgtcgccggggcggcgaggaagatatcgtcctcaaacagcgggaccacatcaaaagccgaattattaaattcaccttcgttggtggcgatcaggatcgcatcaagcgcgtcatcttccagcatatccagcagcatctgattggagcccatggtgagatccagctccagctccggccgacgcagcttcatgcccataataatgcgcggcacggtttcaagggtcagggagtaaagcgtgccgatgcgcagccggccctgcccgacgccggctactttacgcgtcgcttccaggccgcgggtcatcaggctcatgacgtcctggcagtactccagcagcgtccacgccgccgggagcggcagcaggttgcgccctttatgaataaacagcgggcagccgacgccctcttccagcgtatgcagcgcccggtggacgctgacgccgctcagctgcatggcctcagcggttctggcgatgttccctttcgccataaacatcataaataccgacagcttgcggaaagtgatgtcctgattaatgtcgtctttcattgccctgggctccgcgtttcggtcttcattagcattttgtttcgtgatttcaagacagtataaccacaattaatgaatgaaggattagccggaagggggatatcagcgcgagggagagattagagcaatgtcacgttttcgccggggcagcgaagagaggccagtaggcccggtgaggcgtcagccgccaccgggcaatgtcaacgacgtgggcttacagcgccatatcgtgctgcggcgacgtttccgccttcggctccgccggtttggcggtcatcaccggcgcggaggcgttcatctcaatcaccggcggtttggtcaactgcagcgccgccgcggtatcatcccaaacctgctgggtcagcgcgacgttaccgttcagcttctggccgtagctcgggacgatatcgtgaatacggcgctgccattccgctgaatgaaactgctcagggaacatctgcttaagaacgttcagggtaatcggcgcggcggtagaagcccccggcgaagcgcccagcagcgcggagagggttttctgctggtcaaccaccacttcggtacccagcttcagtatgccgcccttctctgcatcttttttgatgatctgcacgcgctgaccggcctggatcagcttccagtcctctttacgcgcgccagggtaatactctttcagcgccgcaaaacggtcgtcgtcgctcagcatcacctggctgatgaggtatttcaccagatcgaagttgtccagacctacgtgggtcatcggcaggacgttatcggtggtggtggtgctcagcaggtcgaagaacgaaccgtttttcaggaatttcgtcgagaaggtggcgaatggcccaaacagcaccacgcgcttgccgtcgaggaaacgggcatcaagatgcgggaccgacatcggcggtgcgcctacagaggcctgaccgtaaactttttgctggtgcgcattggtcaccgccgggttttcggtcatcaggaaagagccgcctaccgggaaacccgcatagttatccgcttccggaataccggttttttgcagtaatttcagcgcgccgccgccggcgccgataaatacgtatttcgcatcgatcgcctgctcttcaccgctattaacgtttttaatcgtcacgtgccaggaattatcggcattgcgtttaaaatcggtgacttcagaagaggtctgcagcgtgaagttattatttttcttcaggctaccgatcagctggcgggttatttccccatagttaacgtcggtacccaccggagtccaggttgccgcaacgcgctgctgcggatcgcgcccttccatcaccagcggcgcccactgttttatttgcgcgtgatcggtagagaatttcatcccctggaataaggtcgtttgctgcagcgcggcgtagcgtttttgcagataatcaacgttatctccccagacgaaactcatgtgcggcgtggagttaataaaagagtgcggatcgtgcaaaatgccgcgtttgacctgcgccgtccagaactggcgggagatcataaactgttcgttaatatccagcgctttgctgacgtcgatggtgccgtccgggcgttccggcgtatagttcagctccatattcgcggagtgcccggtaccggcgttgttccagccgttagaggactccagcgcgacgccatccagcttctcaaccatcacctgtttccagtccggctgtaattcctgcagccaggtccccagcgacgcgctcataataccgccgccaatcagcaggaaatcggtttttttcgaggtatcgtcatttgcgaaggtcgccgagctgacgaacatcgctaatgcggtcatagatataatcgtatttttaattgcaggcataatagaaatatcacatagcacaagtgtaataagagcgtgcatattaacgcacttttactttattttaaaatatcatttacacatccgcacacatagctaattattgttaacctggttttttaacttaaaaaagtaaaagcctcgccagcagcaataaatacgccttgcgatggccattttcaaacggggaattaaacccgggtaagcggatgaagagtatggaataacgatgctgttgatgaccagattattttgcgttatccggcgcgtattgtggaaatacgcgccgtcgggttaagttcaggcaaccgtctgcgccgcgcgtagcgcaatccgcagatgatcgttatgctctgccagcagctcgcgcgcctgccaggcatcgagcccgctgaggagcatgagtattgccgtccggcagtgctgattgcagctggccagcgcggctttggcctcgctgcgcgagccccccgtcgccgccatcacgatcgctatctgccgctcggcctcgtgcggcgtattggcctgcagatcgacgcgcaggttttcataaacccgtccttcgcgaatcgccagcccggtggtcagcatcgtcaggatctgccgctgcgcgatgcgcgctttcggattcccgaaacccgccaccgcttctggcccggtttgcggggcgataatgatatccgccagctgcgcggcttcactggcgggctgctgcgtcacaaccgcaatcggcgcccccagcgaccaggcgtggcgcatcgcgccccagacccacggcgttttgccgctaaccgtcagcgccagcagcatatcctggttgctgaatcgcagagcctcaagttcgaaagccccaagatcgtaatgactcgcggcggtttccatctcctgccgcgcggcggtcgctcctccggcgataagggcgaccagcgaatgttttccctccggggtaaattcattcaccgcctgtgcggcggcttgacccgatgccccggcccccacaatcaccagccgccctcctcggctgagcgtcgccgtcgcgttatccatcaggcgcgcgatcgccggcaaacaggcctcaacggcatcggcaatccgcttatcatccttatgcagcagcgtcagcatatcgagggtggcaagactatcaatatgggtggtttcagggtggcgtcgttccatcattgaagcggttggcttactgctcataaaaacctccatttaaacgcgaaagaaccttccgggacgaaagcgcaggcctgaggcaaaccctttcattgaccatggctattaatggcagtgtaaggcttaagcgacgcgctttaccgccaccggagtcacagttttcatccccctgaagccattcagctgccgattggtcgttatccaaccagcggcgcgttcggcgcgccgaggttgcgaggcgaggccaatgcgctattagcgcaacgtcagcccgccatccacgacatactggctaccgctcacgaaggacgccgcgtcggaaagcagaaacagcgccacatcagccgcttcagccgccgtcccctggcggtgaagcgccaggcggctcaccaccgaggcttcaaattcgcggcgcacctcgtcgcgcataaaatggcgaaatggggtgtcaatcgggccgggaatcagcgcgttaacgcgaatatttcgttcccctaacgccgaggcccagcagcgggttaacgaaatcagcgcgcctttagtcgccgaatagaggcttgccgccgcggccccttcataagcggaagtggacgccgtcaccaccaccgaggctcccgcattaagctttccggcgagcgccgccatctggagaaccggcccgcgcacgttggtcgccatcatgcgatcaaaggccgcggcatccacctgcgacagctccccaaccgctgcgtatccggcgttgagccagaggccatcaagtccgccggatgaatcgatcgcctcggccagcgccgcgccggtcagcggatcgctggcattattgtcaatgacccgcgcccgatccgagagctgccggcgaagagacgccagccgtccgggatcgcgcccggtggcgatcacccaaccgccttcgctatcgatgcgctttgccccggcaagcccgattccgcttgtcgcaccggtgataagaactctttttgcgctaaatctcgccatggtcattgcccctctctgcgtaatcacatttatcaggatggtaaccagcgaagaactgtttgataataccagtattataaataagactgtttggggtaatagccataatgcgcggaagtgattttgcggaattaagagccttcgcgatggtcgttgagcaaggcagttttacccgggcggcggcgcatctcggcgtcacgacctccaccttaagcgcaaccatccggcgtctcgaggagcgcatcggcgtacgtttattacaccggacaacgcgcagcgtcgcgccgagcgaggccggcaagcgcatgatgcagcggctggctcctgcgctggcggcgctggaagacgcggttaccgatgcccggacggccagcgcgcccgcgggccgcctgcgcctcaatgtgtcgcgcatcgccgcgattcattatctggcgccgctgctgggcggatttatgcaacgctatcccaacattgagctggatattgttaccgacgatgctttagtcgatatcgtttcttccggttttgacgccggaattcgtctcggtgaaaagctccatcaggatatggttgccgtcaggctgagcggcgaccttgaaatgaaagtcgtcgcctcgccgcactatctggcgcaagcgccgcagccgcgaaagccgcaggatttgctgcagcacccctgtctgacttatcgcaggcccagcgacggcagcgtttatcgttgggagtttcagcgcgacggcgaacgctacgagattgcggtcaaagggccgatcgtcgtcgatgaaccggccatgctgacgccgttagccctcaagggcaccggtatcgcctatcagtttgcccatcaggtcgatccctggctggagacaggccagctagtccagctattgaaagagtggaccccggcttttcccgggttttacgtttactaccccagccgtaagcagatggcatcgcctctgcgggcgtttattgactatctgctgaccgtcggcggcaaatcgcgtccgccagaattgccgtctggctgattttgcttttattacgcggctttatgtaaaccgcgcattcagcgataatacgcctctatccgttttctcctggggtcggtatgaatgaattcgcgcagcagcccgcgcgtaaacgcgcaatgagcatgaagctgagcaccgccgtgaccttaatgatcggcagcgtcatcggttcagtactgattctggtctatgccctgtggtttatgcagattagcggcgccacccgcgacggcgtaaaagatacggcgctggcggtggcgcggacgctggccgataccccggaagtcaagcgcggcctgacgctgccgccggacagcggcattattcagccgctagcgctggccgtcacccggcgcaatggcctgctgtttgccgtcgtcaccaatatggacggcattcgctactcgcatcccaatagccagattatcggcaaaccttttatcggcgatgacatccggcccacgctggcgggcaaagagaacgttgccgttaaccacggcgtgctggctccggcgctgcgcgtcttcaccccggtgtttgacgatagccgccggcaaatcggcgtggtggcgattggcatttcgctgagcaaagtcgatacgcagatcgccgccagccgctgggatgtgattctgaccgtgctgttcagcgcgctcgtgtgcgccgtcggtacatggagtctggttcgcggcctgaagcgcgtcctgctgggccttgagccgcaggagatctcaacgcagttccagcagcgccaggcgatgctgcactcattaaaagagggcgtcgtggcggtggatacggacggcaaggtgacgctgattaaccccgccgcgcgcgacattctgtttaacggccccgggaacgatatcgcgcaaacgccgctgctggcggatttgcaggaagtgctgcaaaccggcgagccgatttacgatcgggagctgggctgtaacggtctgctgctgatcagcaacacggtccccgtccgcgacgaggatgacgtggtcggcgccatcagcaccttccgtgacaaaaccgaagtcagccagctgctgcagcggcttgacgggatggtgaactatgtggacgccctgcgtaccacatcccatgaatttatgaataagctgcacgtgatcctcggcctgttgaatatgaaaagctacgataagctggaagagtacgtgctgcagaccgcccacacctatcaggcggatatcggcgaaatccagcaccggattaaatcaccggtagtggcaggctttttgatcggtaaaattcagcgcgctaaggagcggggttttaccctcactctcgccgaagagagcctggtgccggactgcccgaatgaaaaacaggtcaccgtactggttacggtgctgggtaatttaatcgaaaacgcgctggatgctatgagcggccaggccgaaggcgaagtcggcctgctgctgcattaccagaacggctggttaagcggcgaagtcagcgatgatggtcccggtatcccggaagcgtttatcgatgatatttttaataaaggcttctccaccaaaggcgaaaaccgcggcgtcgggctgtttctcgccagccagcagcttcgcgaactgggcggatcgctggccgtggaatccgaacccggcgtatttactcaattttttgttcatctcccgtgggacagtaaaaggaaaagtgcgtgataaatgtattaattgttgacgatgatgccatggttgccgaactgaaccgcctgtacgtgggacgggtcagcggcttccgctgcagcggcacggcgtctacgttgagtaaagccagggagatgattaacgacaaggatctggagatagacctggtgctgctggatgtctatatgcagcaggatagcggtctggatctgctgcccgccattcgcgcgtccggacgggccatcgacgtgattatgattacttccgccgcggatgccgcgacggttcaggcctcgatgcgctacggcgtggtggactatctgatcaaacccttccagtttccacggtttgaagaggcgctcaccgcctggcgcgaaaagcgtaagctgatgaccggtcaaccctattatgaacaagcggatgtcgaccggctgctgcacggcggcgtaccggaagccgctgacgcccgcaagttgccgaaaggcctgacgccccagacgctgcgcaccctctgtcagtggattgatgcccatccggacgtggagttctccaccgacgagctggcggcagcggtaaatatatcccgggtttcgtgccgcaaatacctgatttggctggcgcaaattaatattttgtacaccagtatccactacggcgccacgggacgtccggtgtaccgctaccacctgatagcggagcagtacggcctgcttaagcagtacagccagtaagccggtaaccgtcatccagcagctgaaagcggaaacgacgctgtgaagagaggataacgtcgcgatttttagtgacgaaaatcgcttcgatatcctcgcgctggcgcagcgccgcgcagcctttctctacgccaagaccgtagatcagggtggtccagatatcgccgtccagcgagtcggcggaaataatcgttacgctctccagctcgttatccagcgggtagccgctacgcgggtcgagaatatggtgccagcgtttgccgtcctgctcgaagtagcgttcgtaaatgcccgaagtcaccaccgattgccccgccaccgcaatgctgccaatcagcgcatccgccgctgagtacggttttttcagcccgatagaccattcgcccagggtatggacattgccgccgagattaatcagcgcggcgttcacgccctgctgccgcaaatagtcgcgcacccggtcggcgatatagcctttcgcgatggccccaagatcgatctccattcccgtccgcgcaaggtagacgctgctggcggcgtcgtcgaggatcacatcctgcgcacgcgttaacgtcaggcgagcggcaatatcctgcggggcgggcacgctctggccctgaaaaccaacgcgccacagcttcaccagcgggccgatcgccaggttaaacgcgctgtcccgcaccatgctggcggatttggcgcatttaatcagcgcatacaccgggcggctcaccgtcaccggatgtcgcccggcggcatggttgatatccatcacctgggagtgcgcgcggttaacggtgaaaagatcttcatagcctttaatcagctgaaagacgcgggaggcgagcggttcatcgtgaacgtagagcttgaggagaatgggcgaacccatcagtacagcggagtagctgtagacgcggttgtcggacatatcgcactcctcagagagataagaagccgggccgtctatttgccagcccggcgggtgtcgctgacgtttaacctctggcgcgtttcgccgcctgatggcccgcgagggtcccgaagataataatatcggccaccgcgttaccgccgatgcggttaccgccgtgaatgccgccaaccacttcgcccgcggcaaaagcgcccgcaatcacctgatgaccggcattcagcaccgcggtatcggtgttaatggtcacgccgcccatcgtgtggtgtacccccggagcgatacgaatcgcatggtaagggccttcattgatcggcgcacgcagcgcggtggtacggccaaagtcatcgtcatgctgtttttcaacaaagccgttgtagcgttccagcgtattgagaaaagcatggtaatccatccccagtttctccgccagctgacgcggcgagctggcgctggtgacgaaacctttagcgatgtactcatcggcggctttgtttttcgcccggacgtgctcgtcaaagacgatataggcgaagtgctcaggcagcgcgataatcgcggcggaaaccttatcgcgggtctccatttcgttgaagaagcggttgccctgcgggttcaccagtatcgccccgccgccgcgaatcgactcggaaatcaggtacgaggtttgctgctcgacggtcgggtgaatctgaatttcacccatatccacggtgcccgcgccgatgcgttcaagcagcgcgataccgccgccggtcgcccctttatggttggtggtcacaaagcccgccagatccgggcggtatttcaccaccatcgcgctgttggcgctgaagccgccggtagccaccacgatgctcttcgtctgtaccactacggattcgttttcatcggtgagcaggcgcacgccgctcacctcatcgtcggtcatcaggatctcttccaccgatgtatccagcaggacatcgataccgcgtttggtgatgttacgcaccaggccgctgatcaggtagccgccgaccgccgacccgtcgcgcggacggtgggtgcggtcgatgctcatcccgccggtagtggtgatatcgttaagcataatgccgcgacgcgccagccactcaatggcttccggcgcattctccacgaagcggcgaagcagctgcgggtcgtttttgttcttaccgcctttcagcgtttcctggtaaaacagctctttgctatcttcaatacctttcacgcgctggaagcgggtctctgcggcgttcatcccggcagaagctttaatggtgttaccgccgatggtcggcattttttcaacgatcagaacgctcgcgccttcatcgtgtgcctgaatcgcggccgccagaccggctccgccgctgccgaccaccaccacatcgtagcttttcggcgccgcatcgcccgcgccctcttcggcggccagcgctttactggacttcagcatcgctttggaaaccgcctttttcaccgcttcactctggctggttgcgccggaaatcgcatccacgtgcggggtgttggcgctgaggatccgctcgcggatctcttcaaagctggtggtgaactcgacggtctgtaccgggcttgccgccagtgcgatatcggcaatgcggtcgttttccaggctgacgtttatcaccagctcgttagcgtcgtcctgaacggtttcgacgaacatccccggtttgaatttggcgtcgcccatgctcatatcgcggatcatcgcctccaccagcgagaagcgccacagcggttccgggatgttcagcgcttcgcgctggatgctgtcaataaacagctccagatcttcgccagcggcaatgcgcgccgtccagtcaggatacgcgatacaggcgcggcccaccgccatcaggtcgtagccgtgatccaggccctgctcggcatcggccgcgttcactaccccgcccacgcccatcaccggcacctgagccagggtttcggagcgcatggcgcaatatttttcaatcagcggcgtgggatcggtggtatcgacaatcgagggtcgcagcgtggcgccaaccgagaagtggagatagtcgacgccgcgggcggccagcttttccagcagatacatggtgtcagcaaaacggataccggggacttccatctcttccggggagaaccggtagccgataataaaggcatcatcggcgtactggcgggccattttgtgggtgatgtccagtaccgccagcgggaatttcgcgcgattatcgcggctgccgccccattcatcgtcgcgctggttagagtttggcgaataaaactgctggatcagataggtgttcgcgccgtgaatctcgacgccgtcgaaaccggcctgaatggcgcggcgtacgccttcgccaaacttcgcgatcatgccctcgacttcagcgccgctcagcgcgcggggcgttgctgcgccatcgcgcggcgcggcaatcgcgctcggggccaccggctggcgtccgccgataagctgcgggtcgaccatccggccgccgtggtagatctgcagaatcgcttttgacccttccgccttgatagcggcggcaattttcgccaggccagccactttttcatcattatcgataccgatggcgccggggaacgccagaccgtagtcatcaataaagcagcattcaacgataatggtgccgatactgcctgcgcgagcgcggtagtactcaaccagttcgctggtcacggtaccgtcaaaataaccggtgcaggtggtcatcggcgccattaacaggcggtttttaagctcagtaccgttcggtaaagtaaaaggacgcaaaattcgtggatgactggtcataatgacgctccagattttaaatattgaaaattgagaattgggtgacggaattgtttttgtttgtatttggtaatcccttaagtcatgccaataatatagcgctttttttagttaccaaaataattacgttagttaaaaactatttaataccaacaataacatcgatacctcctttgtattattaattaaatataattcgttcacataatggatataaccaataacaaatctgaaaccatttttaacatgcatcgccaggaagacaccaaaataaaatgataaaattcaacaatataaataaatcatcagttcatggaatcattcgtgatttaacattaagccaaatttcagacaaataaacacctcactaaacagggttatccgtaataataaaaaagtggctaacaacccgctttttttgatctaaatcaattgcaacggcgcatgaaagcgcaatatataaataacccaatattttaatttaacgcccaacgaagagctttaaataacggtcagcgcaataaccaaaatcgacaattaataattaaagaaacttttgcaactaaagaaatcgaacggttaagcgatgaccaaaccctatttttaactacttgcagatactcattatgaaagagaaaaagacaaccataccgcctgccggtgcagcaacaaatgctgcttataaacgtctgctgatgatggcgatgcccattatcgttgccgtcttactcttattcgtcccggtgcccgacggccttcccccttacgcctggcactactttgccatttttgtcggcgtgatcgtcggtctgatcttcgaaccgctgcccggcgcggtcatcggtattaccggcgtggtggtgattgcgctgtgcagccagtggctgctgttcagccctgaacagctggccgcgccagggttcaagcttgccggcgcctcctttaaatgggcggtgagcggtttcggtaactccaccgtctggcttatcttcggcgcctttatgtttgccgccggctacgataagacccagtttggccgccgtctggcgctgatcctggtgaagtatctcggccgccgcagcctgacgctgggctacgccattaccttcgccgacctgctgctggcgccgtttaccccctccaacaccgcgcgcagcggggggactatctacccgattatcgctaacctgccgccactgtacggctctaagcccaacgacccgagcgcgcgccgtatcggctcctacctgatgtgggtggccattaccgccgcctgtatcaccagctcgatgtttctctccgcactggcgccgaacctgctggcgctggcgctggtgaaaagcatcgtcggcattaatatctcctggggcacctggtttatcgccttcctgccgctgggtatcctgctgattctggcaatgccgctgctggcctactggttctacccgccggaagtgaaagtcaacgatgaagtgccgctgtgggccgcccgcgagctggaaaaacttggccgcctatcgcgcaatgaaattctgctgctggtcttcgtctgctttgcgctgatgatgtggatcttcgccgccgaatggattgaaccggcgctggccgccctgctggttatcgtgctgatgctgtggaccggcgtactttcgtggaatgacatcaccagcaacaaagcggcgtggaatacctttgcctggttcgctaccctggtggcgctggccgacggcctctcctccaccggttttatcgcctggctgggtaaagaaggcggcgcgctgatgagcggcatctccccgggcgtcgcaaccgtcgtcctgctgctggcgttctatctgctgcactatctgttcgccagcaccaccgcgcacaccaccgcgctgctgccggccatgctgactatcgcctccaccattccggggatgaatatgcaggtgttcgtactgctgatggtgacctcgctcggcgtgatggggattatcaccccctacggtaccggccccagcccaatctactacggcagcggctatctgccgaccaaagactactggcgtctcggcaccattttcggcgccatcttcctggccgccctgctgctgattggctatccgtggatgtccatgatgttctgattcataaccgtcgggccgaaccccggcggttttactcttagggagcaaagcaatgtcgactaaaccatttgtctatcaggaagcctttccgctagcaaaagataagactgaatactatctgctgagcaaagagcacgtgtccgtggccgaatttgaaggccaggagatcctcaaagtagaccctcaggccctcacccttctggcacagcaggcctttcacgatgcggcgtttatgctgcgcgtttcccaccaaaaacaggtcgcgcagatccttctcgaccctgaagccagcgataacgataagtacgtggcgctgcagttcctgcgcaactctgaaatcgcggctaaaggcgtgctgcccacctgccaggataccggcacggcgattattatgggtaagaaaggccagcgcgtgtggaccggcggcggtgatgaagcggccctcgcccgcggcgtctataacacctataccgaggataacctgcgctattcgcagaacgccgcgctggatatgtacaaagaggtcaataccgggactaacctgcctgcgcaaatcgacctccacagcgtcgacggcgacgaatataaatttctctgtatggccaaagggggcggttcggccaacaaaacctatctgtatcaggaaaccaaagcgttaatcactccggcgaagttgaaaaactatctcgttgagaagatgcgcacgctcggtaccgccgcctgcccgccgtaccatatcgcctttgtgattggcggtacctcggcagaagcgacgctaaaaacggtgaagctggcctctacccactattacgacgaactgccgaccgaaggcaacgaacacggccaggccttccgcgatattcagctggagcgggaactgctggtggaggcgcaaaacctcggtctcggcgcacagttcggcggcaaatacttcgcccacgatatccgcgtcatccgcctgccgcgacacggcgcctcctgcccggtgggcatgggcgtctcctgctcggcggatcgcaatatcaaagccaaaatcaaccgccaggggatctggattgagaaactggagagcaacccgggtcagtatattcccgaacatctgcgccagcagggcgaaggcaaggtcgtcagcatcgatcttaatcagccgatgagcgagattctggcccagctttccgcccatccggtctcgacgcgtctgacgctcaacggcaccattattgtggcccgcgatatcgcccacgcgaagctgaaagagcttatcgataacggtgaagaactgccgcagtacgtcaaagatcatccgatctactacgccggcccggcgaaaaccccggaaggctatgcgtccggctcccttggcccgaccaccgcaggccgcatggactcttacgtcgacctactgcaatcccacggcgcaagcatggtgatgctggccaaaggcaaccgcagccagcaggtcaccgatgcctgtcacaagcacggcggtttttacctcggcagcatcggcggcccggcggcggtgctggcgcagcagagcatcaagagcctggagtgcgtggcctatcctgaactggggatggaagccatctggaaaatcgaagtggaaaacttcccggcgtttattctggtggatgacaaaggcaatgacttcttccagcagatccagaataagcagtgcgcaggctgttcgcagcaaagaggatgatattacccgcccctggcggcgggtaaccgtcgaaggccgtcgcatgacggcctgagatgtgcgacaaacctgccgggtggcggctaaacggcatccagctcgtcaaatacctgctgcgccagatgcatcgtggcgttggcggcgggcaggccgcagtagagcgcggagtgcataatcagctctttcagctcatcgcgggtgacgccgttattaaacgccgcgcgcagatgcattttcagctcagcttcgcggttcagggcaatcagcatggcgatggtgatcatactgcgggtatgatgatcgagccccggtcgggtccaggtctctccccaggcgtagcgggtaataaaatcctggaactcttcattcagcggcgtcagcttttccagcgtcttatcgacgtgagcatcgccgagcaccttccgccggacctccattccccgctgatatcgctgtttatcgtccatgcttttccccctgaacaaaacccagcagcgccgagctgaacgcccccggcgcttcgatattcgataaatgcgaagccgccagcacgacgacttctgagaccgggatctgctgatgcaggaagttggcgtccgccaccgttgtgacagggtcactttctccggcgacgatcagcaccggaatcgcgatctgcgcgacctctccacgcagatcggcggcggccagcgcttcgcagcaggccgcatagccttcagcatcgatatgggtcagctggtgacacagtgcttccaccacttccggcgtcttctggcgaaatgcgtgggtaaaccagcggtccgcggcgcctgcggcgaccacttccatcccttcctgacgcaccgtgcgggcgcgcgacagccagccggcctggtcgccaatacgcgcagcggtgttggcaacgaccagcccctgaaaacgttcaggggcaaagcgccccagccacagaccggtcaggccacccattgaaatcccgcagaaccaggctttagcgatattaagatgatcgagcagcgcaatcacatcttcgccgagctgcgccagcgtcactttaccgtttttacgggtggcgccatggccgtgggtatcgtagcgcagcacgcgaaaatgctgcgttaacgcctcaagctgcggctgccacatcgcccgggtagtgcccagcgagttagagagaacgatgaccggcgcgtcttgcggcccgtctatctgataatcaacattcataacgttgctccttatagcgcgccacaacctggcgcacgaagagtgctgagctgccggtcgccgttgtcgggtccagcagttgggttaagcggctggcggagagatgctcgctgaccagcggatcggtttccagcacgcttaacagcgaacgtgacgcatccagcgcctggcgacacagcgcctcaacccggtgatgagcctcggctttgccgacaaactccgccagcgccagagtgacggcctcggccataatcaggccatgggtgatatcgaggtcggcgcgcatcttatgcgggaagacctgcatgtcgcggaccagcgcttcgctctgcgccagcgcgccgccgacgagggttatcagctccggcagcgtttcccactccgcctgccagccgcccagcgcccgctcgtgctgctggatctgcccggcatagagcgttgccaccagcccgggcgtacgctgggcggcggtcaaaatagcggcgcaggagatgggattgcgtttgtgcggcatggtagacgatccgccgcgtccttcggcgaccggttcacccacctctgcaacctcggtttgcatcagcagagaaaaatcattggcgaatttacccagcgtgccgcagacgcccgcgtaccatgcccccacctccagcagccggtcacgctggctgtgccacggcgcgtccggaagctgcaggtcgagagttttcgccagcgcgccagcgatccgcggcgcctgcgttttaagggaatcgagggtgcccgccgcgccgccaaactgcagcgccagcacccttgagcgcatctctcgcagacgcacctgccagcgcagcagcgcatccagcgtcccggccagtttcagaccaaaggtgaccggcagcgcatgctgcatccaggtacgcccgggcatcaccgtatcctgatagcgcgccgcctgatgggctaacgcgtcgagcagttgctgcagcagggagtccgtttccgccagcgcgccgcgcagttgcaggataaagccggtgtcgatagcatcctggctggtcgccccccagtgtacgtagcgcgccgccgcgtcatcccgttgtttaacccgcgcggtcagctgtttgaccagcgggatcgccagattcccggcgctggcggcggcctgccccagcgcggcaaagtcgatgttttcgtgccggcaactctcaataatgggattaagcgccgcctgcggcacgaggccgcattcgacctgagcgcgagccagcgcggcttcaaaatccagcatcccctgtacccgctgcgcatcgctgaaccaggcggtcagcggactggtgcgcatcatcggggtcaacaaactcattatggctccttaaacgcgttctataatcagcgcgatcccctgaccgacgccgatacacatggtgcacagcgcatagcgcccgccggtacggcgcagctggtacgccgcggtcattgccagacggccgccggaggcgccaagcggatgtccgagggctatcgcgccgccgttagggttgacgtgcgccgcatcgtcgggcagacccagatcgcgcgtgaccgccagcgcctgagcggcaaaggcctcattcagttcaatgacgtccatctgcccaagcgttagcccggtttgcgccagcaccttacgtaccgccggcgccgggccaaatcccataatacgcggcgccacccctgccgtcgcgacgcccaccacgcgggcgagcggctgtaaatcattggcggccagcgcctgctcgctggcaagcagcagcgcgcaggcgccgtcgttgactccggaagcgttacctgccgtcaccgtaccgtcggcgcgcaccacgccgcgcagcctggccagcgcctccgccgtggtgctgcgcgggtgctcatcgcggctaaagagtagcggttcgcccttacgctgcggcaccgagacggcgatcagttcgttggcaaagcgtccggcctcctgcgccgccgccgtacgcagctggctacgcagcgcaaacgcatcctgatcctcccgcgaaatggcgaaatcgtccgccacgttttccgccgtttccggcatcgaatccacgccgtacagcgctttcatctgcgggttaatgaagcgccagccgatggtggtatcttccatccgcatcgtgcggctaaaggcgctttcggccttgcccatcacaaacggcgcgcgcgacatgctctccacgccgccggcgatcatcagctgagtttcgccgcttttaatcgcgcgcgctgcgataccgattgcatcaaggctggaaccgcacaggcggtttacggtactacccggtacgctttccggcagaccggccagcagcagcgccatgcgcgcgacgttgcggttatcttcccccgcctggttagcgcagccgtaaatcacatcgtcaatacgcgccggatcgagtcccgggttgcgctccagcagcgctttcagcggcagcgccgccagatcgtcggcgcgcagggcggccagggtaccgccaaagcggccgaacggcgtccgcaccgcatcacagataaatgcctgattcatcataggttccttacgcgctttccgccagttgtgcaaaagtcagcgccaccggcgtgatgcgctgcagttcctcaaaagagaggccgttaaagatttcccgcaccaccgggccgctttcgctgatatcgatgaccgccaggtcggtgtagatacggctgacgcagccgacgccggtcagcggataggtgcagtgctctaccagcttgcactccccgtcgcgggtcaggtgatccatcatcacgaagacctgacgagcgccaatggccagatccatcgctccgccgacggcaggaatggcgtcgggcgcgccggtactccagttcgccagatcgccgctggcggaaacctggtaagcgccaagcacgcagatatcgaggtgcccgccgcgcatcatggcgaaggagtcgccgtggtgaaagtagcagccgccgttgagcagagtcacatactctttcccggcgttaatcagctccggatcctcttcccccggcagcggtttcggccccatccccagcaggccgttttcgctgtgcaggaagatttctttatcggcaggaagatagttggcgatgcgggtgggcaagccgatccccaggttgacgtaagcgccttcgggaatatcgcgggccacgcgctgggccatctcatcgcgagtcagtttttgcattaagagttcctcaggcgcttttagcggcaatcaggttttccagggagtagacgcgctgcacaaaaatgcccggggtaatgatgctttccgggtcgagatcgcccaagggcaccagctgcgaaacttctacaatggtggttttcgcggcggtcgccataatcgggccaaaattgcgcgccgctttgcgataaaccaggtttccccagcggtcgccctggtgggctttgatcaacgcgaagtcggccctgatggggtattcgagcacgtaatgacgcccgtcgatttcgcgggtctctttcccctccgccagcggcgtaccgtagccggtgggggtaaacaccgcgccgaggccagcgcctgccgcctggatccgcgccgcgaggttgccctgcggtaccagctccagctcaactttgccgcggcgataaaggtcatcgaaaatctgcgaatcaacctgacgtgggaatgaacagatcatctttcgcacccgaccggccttcagcagcgccgccaggccgacttcgccgttgcccgcattgttgttgataatggttaaatcacgggccccctgttctatcagagcatctatcaggtacgtcggctgcccggcggggccaaaaccgccaatcattatggtcgccccgtcgtggatcccggcgatggcatcacgtagcgtcgacacgcttttatcaatcatcaggtcgctcctgtatgtgcggtaatcgcacttttattcgttgttcgcacaaaatgtgacccgcttaacgatgctggtcaagggcgataatcgaaatatggtgcgataatcgaacatcgtgtatgtttagcgaaagaatgtgatcgacggcaaatacggagaagaaaatggagaagcatccagatgatttactgacgggcgatagcgatccgtttaagggcgatccgaactttatggcttcgctggcgcgcgggctggaggtgatccaggcgtttactccgcagcgcccgctgctctcaatttcgcagatcagccaaaagaccggcattccgcgcgcggcggtgcgccgctgcctgtatacgctgagcaaactgggctttgtttacgccgaagatggtaaaaatttccagctgcgaccgaaaattctggcgctgggccacgcctggcttgcctccacgccgctggcgcgttcggcgcagccggtgctgaagcatttaagcgaaatgctcaatgagtcctgctccatcgccactctcgacggcgacgacattctttatatcgctcgcgcgtcgagttcgcgcattatgaccatcgatctcgacatcggcagccgcctgcccgcctgggcgacctccatgggacgcgtgctgctgagctatcagccggaagagaagctgaacgatatgctgggccgggtcaccatgattcgctataccccgcaaaccgttgattcggttgcaaagctgcgtaccgaacttaagcgcgtgcaccagcagggctacgcgcttaacgatcaggagctcgagatggggctgcgctcgctggcggtgccgctgtttaaccctcaggggcagattcaggcggcgctgaacgtcggcgtacacgccgggcaggtctccacgcacgagatgctggagcgggtgttacccgagctacagaaagcagcccgggaactgacgctgctgatgcgctagcggctatgcttggcgtggcgctcccagttttcctgctttgcctccgccgattttcgcagggccacgtagcaggcgccgctgccgccgtggtgcggtaacgccgcgcagaacgcctggacttccgggagttccaccagccagcgcgccaggtagctgcgaataatattggcgtgcgcgttatcgtcgcgccctttgccatgcacgatcagcacattacgcagcccctctttttgcgcctggaccacaaaagcaaacagattctgtcggcacttctccaccggctggcgcagcagattgaggcttgcctgctggccgtatttgccgcgccggagcttatccagtacgccgctttgcagaccttcccgcttaaactcaagggcggttgccagcggcacaatatcgagatagccggtggtcagaaagttatccagctgcaggggatcaatccgctgcgcggcgcgggtattgcgcacggggtgccagtgaacatcgtgattatgtttcagaggctgaacgtcctccatggcgccaagaaatagggatttgtcgtcaaggttcatgcgcgctcctccagctactaccgggtggttactatagccgtctcgcggcgcctcctcaacgcgtttaaccacctccgcgcgattatggaaacagttgtcggctctgacgacgaaacagcgtgattaatgacgcggttaagggcgtttgccgcgtatcgcggcgctgaatcagaaaataggtggctttgggtaacgcttcgcggatggggatcatcaccagcttatccgccatcatcgggtcgttgccaagttcgaccggcagaatgctgagaaaatcgcttttcaccaccaggctaatgcacgaggagaaagtctcacaaacgatatccacctttggcgccagtccggcctggttaaacatctcctgcagctgtttgaagtagctgccgcgcggcgtcggcatcgtccagtggtgatcgagcagctcggtcagtgaagtgacgtgtgccgccgggtgaccggcgcgggcgaataccgcgaagggtttctcaaatagcttctcaaagctgaattcatgatcgtaggggccgggatagtaagtattgatggtgaaatccagctcaccctgacgcagttcattaatcatcgccagcagctgtccttccataatccgcaccttcaccagcggatgctgctgatgaaagcggcaaataaccgaaggcatcagcgaacgcgctacgctggcgccaaggccgatattaatctgcccggcctgctcgccctgacgttgcagcaattcatcctgcgccacccgcagctcttccaggatcaggctcgcatgttgataaaagctttcgccattttcggtcaacgccaccccctggctacggcggacaaacagctgcgcggagagcccctcttccagctctttaatcgctttggtcaacgccggctgcgaaatcgccaacgcccggctggcgccgcgaatacttccttcgcgcgcgacctcaacgaaggcgcgaatgtggtgaaatttaatctgaaatgacatgttgtgagtgataaccagtgtttatcagacagaagaaaatgacatctactgtaatcgattgtgctgtggcaggttaaggatgagagtgcatgaaagtgatgagtgataagtaaaggctatcacttcgtgaacaccatcacagtttttgcttataacgggaaaggttatgccgcaactttatgatttcatcaaccagctggcgccaaaaatgaccgaatggcgtcgcgattttcacctgcatgcggaatccggctggctggagttccgcaccgccagcaaagtggcggaagtattagacggtctgggttatcagctggcgctggggcgcgacgttatcgatgccgatagccgtatgggcctgcctgatgaagagaccctggcacaggcgttccagcgcgcccgcgcgcagggtgcgcctgaacgctggctaccggcgtttgagggcggcttcgccggagtggtggcgaccctcgataccgggcggccggggccgacgctggcgtttcgcgtcgacatggatgcgctcgatctcaacgagcagcatgacgatagtcaccgcccgcatcgcgatcgttttgcctcctgcaacgacggtatgatgcatgcctgcggccacgacggtcacaccgcaatcgggctgggtctggcgcacgtgctgaaggagtatgccgcgcagctcaacgggacgatcaagctgattttccagccggcggaagaaggtacccgcggcgcgcgcgccatggtcgcggcgggcgtacttgatgaggtggattactttaccgccattcatatcggtaccggcgtccctgccggcaccgtcgtctgcggcggcgataactttatggccaccaccaaattcgatgtgcagttcagcggtgtcgccgcccacgctggcggtaaaccggaagatggccgtaacgcgctactggcggcggcccaggccgcccttgccctgcacgccatcgcgccgcacagcgccggggcgtcaagggttaacgtcggcgtcatgcaggccggtaccggacgtaacgtggttccctcctccgcgctattaaaagtcgaaacccgtggcgaaaccgatgccattaaccagtacgtctttgagcgggctaaacaggcgatcgccggtgcggcgaccatgtatgaagccagttaccagttgcagctgatgggcgcggccacctccagcgccccgtcgccggcgtgggtggactatctgcgccagcagacggcccaggtccccggcgttaaacaggctgtcgatcgtatcgctgccccggcgggttccgaggatgccaccctgatgatggcccgggtccaggagcgcggcggtctcgcctcatacatgatattcggcacggaactgagcgccggtcaccacaatgaaaaattcgatttcgacgagaacgtgatgaccctggccgtcgaaacgttagcacgcgtcgccctgaactttccctggcagcgaggtgtgtaatggaacacgtttatcaatttgtcgatgacgttattgaggggcggcgcaacgatttttgcgccattgccgatgatatctgggaccatccggaaacccgctttcaggagttctggtcggctgcgcgtttggccgatgcgctggaagcggaaggctttcaattgatccgcaatgccggcgggatccccaacgcctttatcgccagcttcggcgcgggccaaccggtgattgccctcctcggcgaatttgacgccctggcggggctcagccagcaggcccactgcgcggaacccgcgtcttcgacgccgggagaaaacggccacgggtgcgggcataatctgcttggtacggcggcgttcgccgccgcggtcgccgccaggaactggctgcagcaacagggcggcgccggcacgcttcgcttctatggctgtcccggcgaggaaggcggctcggggaaaaccttcatggtccgcgaggggttattcgatgacatcgatgccgctctgacctggcatccggaagcctgggccgggatgttcagcacccgcacccttgccaacattcaggcggcgtggcggtttaccggcaccgcggcgcacgcggcaaactcgccgcatttgggccgcagcgcgctggatgccgtgacgctgatgaccaccggcagcaacttccttaacgaacatattatcgaaaaagcgcgggtgcactacgccatcaccgataccggcggcgtctcccccaacgttgttcaggcgcaggcggaggtgctgtatctcattcgcgcgccggaaatggccgacgcgcagcaaatcttcgcccggatcgagaaaatcgcccagggcgcggcgttgatgaccgagacccgcgtcagctgtcgcttcgaaaaagcctgttccagctatctgcccaaccgcacgctggaagcggcgatgtatcaggcggtttgccattacggcacgccgccctggagcgcggaagagcgcgcattcgccgccgaaattcgcgcaaccttgagcgcgaacgatatcaataacagcctgaaaaacattgccgacaccggcggcgaggacgggaaagcgttcgcccgccgccaccgcgaaacgcgcctgatcgatgaagtggcgccgtgggcggcaacggacaacatccttgcgggctctaccgacgtcggcgacgtgagctggaaggcccccgtggcccagtgcttcagcccctgttttgccgtcgggacgccgctgcactcctggcaactggtgagccagggcagaacctccatcgcccacaaagggatgctgctggcggggaaagtgctgggcgcgacggccattcgtctgttcagcgacagggcgttactgaccgccagccagcaggaactggcgcaggtcttagccgaaaggccctaccggtgccccattccacaggaggtcaagccttcgattttaaaataataaaagccccgtggatggagtacggcaacgcggtaatcgccaaaaaaataacggctgacacgcccaggggtaaagagacaaccaacacaacaacgacaactgaggaacgcccatgagtatgtcatccataccgtcgccttcccccaccggtaagctttatggctgggttgaaaaaataggtaacaaggtcccgcatccgtttttactgtttatctatctgattgtggcgttaatgatcgccaccgccatcctgtcggcgctgaacgtcggggtacagaaccccaccgacggctcgcgagtggtggtgaaaaatttgcttagcattgaaggattgcactggtttttaccgaacgtcattaagaacttcagcggtttcgcgccgctgggggccattctggctctggtgctgggggccggttttgcggaacgagtgggcctgctgccttcgctgatggtgaaaatgtcatcccacgttagcgcccgttacgccagctatatggtgctatttatcgccttctttagccacatctcttctgatgccgcgctggtaattatgccgccgctgggcgccctgatgttcctcgccgtcggccgccaccctgttgccgggctgctggcggccatcgccggcgtcggctgcggcttcacggccaatctgctcatcgtcaccaccgatgtcctgctctctggcatcagcaccgaagcggcaaaaacccttgacgcctcgctccacgtcagcgtgattgataactggtattttatggcaacctcagtgatcgttctcacgctggttggcggattgattaccgataaactggtggaaccgcggttagggcaatggcaaggcaacagcgatgaaacgctgcagacgttgacggcggaacagcgcttcggcctgcgcgtggccggcgtggccgcgctgttattcgtggcggcgatcgcgctgatggtcgtgccggaaaacggtatcctgcgcgatcccatcaagcataccgtgatgccttcgccgtttataaaagggatcgtcccgctcattatctttttcttcttcgtcgtttcactggcctacggcatcgccaccggcaaaattcgccgccaggccgatctgcctcagctgatgattgagccgatgaaagagatggcaggttttatcgtgatggtcttcccgctggcccagttcgtcgccatgttcaactggagcaatatggggaaatttatggccgtcggcttgacggatctgctggagagcgcgggaatgaacggcgtaccggcgtttgtcggcctggcgctgctatccgcctttttgtgtatgtttatcgccagcggttcggcaatctggtcgattctggcgccgattttcgtgccgatgtttatgctgctgggctttcacccggcattcgcgcagattctgtttcgcatcgccgactcatcggtgctgccgctggcgccggtatcgccttttgtgccgctatttctcggcttcttacagcgctaccggcccgacgctaagctgggaacctactactcgctggtcttgccttatccattaatattccttggcgtttggctactgctgctggttggctggtacctcgtggggctgcccatcggaccgggtatttatccgcgattaccttaacgtcgcgacaggccagggaaggccacaaaaacgttaacgccaggtcgtgcggttactgatgactttatacagtccttcaatcgccaaagcgatcagatgaattactaagccgctgataatcacaattacaacgccagtcatcatatattgcatatcaccacctttgttggtaaaaacccgcgcagaaacgccgggaaatcatggactcaaggaaagccagtctgtttatctgccgcgccggatggttgccggtgaattcgccgccggataaaggtagcaaaatcgccttgccaacgcgtctgcgagttaatgtaaaaataaacatcgctttcctcacctcattattaatagtccatgctgaccctgtttgttgaccttttcggagtatggtttgcccacatcgcgtcgtgctatggtgatgccctgccaaaataacctcgctgaaggaggaccgatgctcacgctgttgcaagataaaattgacaccccgctggggccgctgtgggtgatttgcgatgagcagtttaacctgcgggccgttgagtgggatcagcaccgcgaccgcatggagcaactgctggatgttcattatcgccgtgaaggctaccaacgcgttgattcgcgtaatcccggtaacctgagccgtaagcttagcgattacttcgcgggcgatctcgccgttattgacaccttacctaccgccaccggcgggacgccgtttcagcgggaagtctggcaaacgctgcgcaccatcccctgcggccaggtcatgcactacggtcagctcgcggaggcgctgggacgtccgggcgcggcgcgcgccgtgggtgccgccaacggttcaaatcctgtcagtattgtggtgccctgccaccgggtgatcgggcgtaacggcaccatgacgggttacgccggcggcgtgcagcgaaaagagtggctattgcgtcacgaaggctatctgctcctttgaccgtaagtgccttttctggaatcttccggtaattttacaatccaatatcgccagataacttattcataatcaatgagataaaatgggtaactgatttacccttttaatattacgtgtttcaggggttcgagacttacctgctcaccaaaaagatgttaaaattgaccaatatcaattaaagcctgagcagacttatgatcccggaaaagcgaattatacgacgcattcagtctggcggttgtgcaatccattgccaggattgcagcattagccagctttgcatcccttttactctgaacgagcatgagcttgaccagcttgataacatcatcgagcggaaaaagcctatccagaaaggacagaccttgttcaaagccggtgatgagctgaaatcgctgtatgcaattcgttctggcaccattaaaagctacaccatcaccgaacagggcgatgagcagatcaccggttttcatctggccggcgatttggtcggctttgacgctatcggcaccgcccaccacccgagctttgcccaggcgctggaaacctcaatggtctgcgagatcccgtttgaaacgctggacgacctctccggtaagatgccgaacctgcgtcagcagatgatgcgtctgatgagcggcgagatcaaaggcgatcaggatatgatcctgctgctttctaaaaagaacgcagaggagcgcctggcggcctttatctacaatctgtcccgccgtttcgcgcagcgcggcttctcaccgcgtgagttccgcctcaccatgacccgtggcgatatcggcaactatctgggcctgacggttgaaaccatcagccgcctgctgggacgtttccagaaaagcggtatgctggcggttaaaggcaaatatatcaccatcgaaaacagcgacctgctggcgcagcttgctggccaggcccgcaacgtcgcctgatagtcctcccgtatccggccggatcgcgaatttttttctaatttgttgatctggccaggctcatcccctgtttcatttcatccatataggttatctttttaatacagactgtagttacagttgtaaggagaccctgtatggcgaagtatcagaacatgctggtagtaatcgaccccaatcaggacgaccagcctgcattgcggcgcgcggtgtatctgcaccaacggattggtggccgcatcaaagcctttttgccgatctatgatttttcttatgagatgaccaccctgctctcccccgacgaacgcacggccatgcgccagggcgtcatcgggcagcgtaccgcctggatccgcgagcaggcaaaattctatatagagtccggcgtgcccattgatattaaagtggtgtggcacaatcgtcccttcgaagccattattcaggaaatcatcagcgacaagcatgatttagtgctgaagatggcgcaccagcacgacaagctggaagcggtgattttcaccccaacggactggcacctgctgcgtaaatgcccatgtccggtctggatggtcaaagatcagccgtggccggaaggcggtaaagcgctggtggcggtcaatctcgccagtgaagagaactaccacaacgcgctcaatgaaaaactggtcagagaaaccattgagctggcggaacaggttaaccatacagaggttcacctggtgggcgcctatcccgtcacgcccatcaatatcgcgattgagctccctgattttgaccccagcgtctataacgacgccattcgcggtcagcatctgctggccatgaaagcgctgcggcaaaaattcggcatcgatgaaggccgcacccacgttgaaaaagggttacctgaggaggtcattcccgacctgtcagagcatcttcaggcggggatcgtggtactgggtacgattggtcgaaccggactctcggcagccttcctcggcaataccgctgaacaggttattgaccacctgcgctgcgacctgctggcgctgaagccggaccagtaccagacgccggttgagctggacgacgaagaagacgattagtccgttgacttcattcgtggtaataagacgtcatcccccgcccgcgcgggggatttttttgcatcccattaacaaaaataaagggccatttggccccggtttcaacagctttatgggtaacgaaaacgttagtggatacctaagcgccaggcgtgatcgatctcttctttaagctccatggacgaaagcgccattaaatcggcgaactcaagttccagcaatttcagctttttcagatactgcgcgggggttaaagcagcggggtcacggcgcagaaattcgatggccagttgcgtgggggttaactcggtatccataatatcctcagtttgggtgaaaagcagcctattgtaacactttcgcctgattattttatgagcaaataaccccttcgttgcctatataaaaaagccgtctcagaagagacggcttaagaagcacaggttttaaacgagcaggccttacaacgctttcagaatcgcatcgacgctggctttggcatcgccaaacagcatgtgggtgttctctttaaagaacagcgggttttgtacgccagcgtagccggtgttcattgaacgtttaaatacaatgacgttctgcgctttccacacttccagcaccggcataccggcgatcgggctgcccggatcgtcctgcgcggccgggttcaccgtgtcgttagcgccgatgaccagtacggtgtcggtatcggagaaatcatcgttgatctcatccatttccagcacgatgtcatacgggactttcgcttccgccagcaggacgttcatatggcccggcagacgcccggcaaccggatgaataccgaaacgcactttgattccgcgcgcgcgcagtctttcagtgatttccgcgaccggatactgggcctgcgcaaccgccatgccgtagcccggggtgatgatgaccgactgagaacctttcagcatctcagcggtttcttcggcgctgatttcacggtgctcacccacttcttcatcacctgtggacgccgtgccgtcagaaccaaaaccgccggcaatcacgctgaagaacgaacggttcatcgccttacacatgatgtaggacagaattgcaccggaagaacctaccagcgcaccggttacgatcagcaggtcgttgctgagcataaagcccgccgccgctgccgcccagccggagtaggagttcagcattgataccacgaccggcatatccgcgccgccgatggaggccaccaggtgccagccaaacgccagggcaatcacggtcattaccagcaggcacagtacctgcatgccgatgctgtcggtacgcacgaaaacgatcagcagcaggaaagaaacgaccagcgccgccaggtttagcttatgacggttcggcagcatcagcggcttagaagacatcttgccgcacagcttgccaaacgccacaacggaacccgtaaaagtcaccgcgccgatgaagataccgaggaacacttcggtcaaatgaatattgaccagaatctgttccataccggtttcatgctgcagatagctgttaaagccaaccagtaccgccgccaggcccacgaagctgtgcagaatcgccaccagctccggcatctcggtcatttcaactttcttcgccaggcgaataccgatcgcgccgccgataaccatcgccagcaggatccacgcgacgttgctgctatccggccccagaatggtcgccaccagcgcaatcgccatcccggcaatgccgtagtagttcccctgctgggaggtttcgtgtttggaaagccccgccaggctaaaaataaacagaatcgcggcaacaatgtatgcagctgtaactaatccaccagacatttgttaccccttatcctttgcggaacattttcagcatgcgctgagtgacggtgaaaccaccaaaaatattaatgctggcgatcagcaccgcgataaagctcaggaagctgacccagccgccgtggcctatctgtaacaatgcccctaccacgataatgccggaaatcgcgttagtgaccgacatcagcggcgtatgcagcgcatgggagacgttccatacgacgtagtaaccgaccacgcaggagagcgcgaaaacggtaaagtggccgaggaactctttcggcgccacgcttgccagccagccaaacagaataatcgccagcgccatcagcgcatacttgcgcagcggcgagctcggtttcgcctctgcttttggcgcttcaacctttttcgctgccgcctgcggctgagcagatacctgaatgggtggagcgggccaggtgatttcaccctcgcgaaccacggtaacgccgcggataacgacatcatcaaaatcgataacgacattgccgtctttctctttgcacagcagcttaagcaggttaaccaggttggtgccatacagctgtgaggactgcgtcggcagacgaccagggagatcggtataaccgataatcttcacgccgttggcggtggtaaccacctggcccggcacggtgtattcacagttgccgccgttttgcgacgccaggtcaaccaccacgctgccggacttcatggagtcaaccatctcgcgggtaatcagcttcggcgccggtttacccggaatcagcgcggtggtaacgatgatgtcgacatctttggcctgggcggcaaagagcgccatctcggctttgataaaggcttcagacatgactttggcatagccgtcgccgctgcccgcttcctctttaaaatccagctcaaggaactcggcgcccatactctgcacctgttctttcacttccggacgggtatcaaacgcgcggacgattgcgccgaggctgttagccgcgccgatggccgccagaccggcaaccccggctccgataaccatcaccttcgcgggaggaaccttacctgccgcggtgatctgcccggtgaagaagcggccaaactcgtgggcggcttcaacgattgcgcgatagccggcgatgttagccatcgaacttaacgcatccagcgactgagcgcgcgaaatacgcggcactgaatccatcgccatcacgttgatgttgcgcgccgccagtttttccatcagctgcgggttttgcgccggccagatgaagctgatgagcgtcgtgccgggattaagcagcaggagctcttcgtcatcgggcgcgttcactttcagaatgacgtcggactgccagacgtcatcatcgctaacgatctccgctccagcctgaacgaaggcctcgtcgtcgaaactggccagcttacctgcgccgctttctaccgcgacgctgaacccgagtttcagcagctgctccaccgttttcggcgtggcggcggcccgggtttccagggctagtctctcttttggtacaccaatacgcatagttttcccttccatcggtttttgatgatggtttacttttcttacaaacgaccgtcgcgaaggcggatgaacgtgccttccaacatatgtctgaaaaaataaaacagtaacaaactttttataacctactgaaaataccgattgtgatctacagcaataaaacagaaattttgattttattggtaaaacgcacggctaaccgtgccaggcagcaatatttaccttatttttatgccagcgcctgataatccgcttggcagaggggttaattcaccatttatcgccgtcttgaacatcgtattaacattacgttaacttatgaaagtgatatcgattatcgattttgctggtcaagcggctgttttttcaacatatcgaaaaatgttatatttctgcagtatacgtttagggcgacaactgaaaattgacgcagacagtcactcacgataaatgcaataatcaaatgttttcagtcaacaacaataccagtacatggtttgcgcaaggcaaaggattatttttatgaagcttaagaactcactcctggcgtctgctcttctggctacaaccgcgttgtctgcccatgcagcgaccgagctgactccggagcaggcggcagcgctgaagccctacgatcgcgtagtggttaccggccgttttaacgccattggcgacgcggtgcaggccgtttcccgtaaagcggacaaagaaggcgcagcatccttttatgttgtcgacacgtctgattttggcagcggcggcaacctgcgcgtaacggccgatttttataaagaaaatgccccgcaggccgacgcgccgaaaaatcgtgtgattaacggcgtaatggaattaccgaaggaccaggccgtcgagctggagccgtttgataccgtcaccgtacagggcttctaccgcagccagccggaagttaacgacgccatcaccaaagccgctaaggccaagggcgccgcctccttctttatcgtgcgccaggttgatgccaaccagggcggcaaccagcgaatcaccgcctatatctacaaagccgatgccaaaaaacgcgttctgcaaagcccggacgctatcccggcagattcagaagccggtcgcgctgcgctggcggaaggcggagaagccgcgaagaaagtggagatcccgggcgtagcgaccaccgcagcggtcggttccggcaccggcgtaggccgcttctttgaaacgcaatcatctaaaggcgggcgttacaccgtcactctgccggacggtaccaaagtcgaggaagtgaacaaaatcaccgccgcgcagatggtgccatacgacagcatcaagttcaccggtaactacggtaacatgacggaaatctcctaccagacggctaagcgcgcggcgaagaaaggcgcgaagtactaccacattacccgccagtggcaggagcgcggtggcaacatcaccatcagcgccgacctgtataagtaacggcgtctgagctgaacaaaaaggcggcgatctgccgccttttttctttttttcatttctcgccattgcatgcatacaaaacactccgtaaaatcccgcgccttagcgcaatcctccatttttatgcgatttcgccaaataaatattcttagtttgatgattgtcacctcgggaatgcaatggaaaagaaactgggccttagcgccctgaccgcgctggttctcagctcaatgctgggtgcaggcgtattcagcctgccgcaaaatatggcagccgtcgccagcccttccgcactgcttatcggctggggtatcaccggcgtggggatcctgttcctcgcctttgccatgctgctgctcacccgcattcgccccgaactcgacggcggtatttttacctacgcccgggaaggctttggcgagttgataggcttctgctccgcctggggctactggctgtgcgcggttgttgccaatgtctcctatctggttatcgtcttctctgcgctaagcttctttaccgatacccccgagctgcgcctgtttggcgacggcaacacctggcaatccatcgtcggcgcctccgtcctgctgtggattgtccatttcctggtgctgcgcggtgtacaaacggccgcgggtatcaacctggccgcgacgctggccaaactgctgcccctcggcgcgtttatcgcgctggccgccatcgcgtttcgtatggagacattccgcctggatttcagcggcctggcgctgggcgtaccggtatgggagcaggtgaaaaacaccatgctgatcaccctgtgggtttttatcggcgtcgaaggcgcggtcgtggtttccgcacgcgcgcgtaataaacaggatgttggccgcgcgacgctgctggcagtactctccgcgctggcggtctatctgctggtgacgcttctctcgttaggcgtcgtgccgcgtagcgagctggcggaaatacgcaacccctcaatggccgggctgatggtcaacatgatgggctcatggggggagattgttattgccgccgggctgattatttccgtctgcggcgcgtatctgagctggaccattatggcggcggaggtgccctatctggcagcaacgcataaagccttcccgcgcctgtttgcccggaccaataaaaacaatgccccgtcggcttcgctgtggctcaccaacgtcagcgtacaggcttcgctggtattgatttggcttaccggctcagattacaacacgctgctgaccatcgcctctgagatgatcctggtgccctactttctcgtcggcgcatttttgctgaagattgctgagcgcccgctgcacaaggccgtcggtgtcggtgcctgtatttatggcttatggttattatatgcgtccggccctgtgcatttattgttgtcagtgatactttacgctccgggtcttctggttttcctgtatgcccgtcgtacacaccagcacgatcgcccgctcaaacgccgtgacctggcattaattggttttttgctggttgccgccgtaccggcaacgtggatgttggtagggtaagcggttaccctgccgctgaactcaaaggagatacccatggctgatatccagcctcgtccaatcctgattaccggcgggggccgtcgtatcggcctcgccctggcccgccattttctggcccggcagcagcccgttattatcagctaccgcacctggtatcccgccgtcgacgcgcttcgtgaagcgggcgccgtttgtctgcacgcggatttcagcactgacgatagcattctggcgttcgccgaagaggtgaaggcgcacgccggcagcggtctgcgcgccatcatccataacgccagcggctggatggcggaaaagcccggggtgccgttaaccacggtgctcgccagcatgatgcaaattcacgtcaacgccccctacttgctcaaccatgctctggagagcctgcttcgcggccacggccatgcggccagcgacattatccatatcaccgactacgttgtggagcgcggcagcgacaaacacattgcctacgccgccagcaaagcggcgctggataatatgagccgctcgttcgcccgcaagctggcgccggaaattaaggtcaatgctatcgccccttcgctgattttatttaacgaaggcgatgacgcggaataccgcaagcaggcgcttgataaatcgctgatgaaaatcgcgccaggtgaaaaagagatcagcgacctgatcgaatacctgttcagcagccgctacgtgaccggtcgctcatttgccgtcgacggcggccgcaatctgcgctagtggaaacgactccagccgataattaacagccacgcgcagaggctccagcaccccactgcgcctgccagagcgaacggcaggcgcataacgccggtgaaataccatagcgagagcaaatagataaagtacggaatgatcgaccacatcccgaatacgatggtggttcgcagcgcttcgatcccccgttcgctggcaacgatatagttcgcgatcagggcgaaagtcggaaagagcggaatcaacccggcgatatagtagttcttcgttttagacagcacgccaatcaggacaacgaccagcgcgccgagcagcgcttttatcaacaaccccataccttttgccttaacatttaaacaacaagaccccgcagcataacggaagcgccgacaattataaacgcgcaagagcggccgataccgtgtagaagcaaaagacctattttttagcggtctcatcactgacgccagcccctatgccgaatatccgcagctggtattaaacgtacgcaaggatgatatccctggcaagcgagcacgttattcgaagaccgttttcgctgccttaaaaacccttcggctaaatacacacattaaaccgaaaagagaatattttttctgattgttgagttatacgtataacatattatttttcgtatttttagatacaaatcaaattagcctattttcggctcatctccccctcacgtatttacacagattttaaaacctgaagcgctttactgacgggcatttacaaaatatccaactcaataactgcaccgcttcagtgcagctagtgatctgcactaaatgattcaaatcaatactggcgaaatagcttaaaagttgttaattgatatggttgatttttatcataaggggttattttgaaattattctttttgcgcaaatcctgaataagcgcacatagccattttttagcaaaatggctaaataaaaccaattattttgatttacatcaatataaaaccgatttcacaaggaagcatactttgccgttaataacaggcacggtagtagatatgatcgtaattatatgattttacaatctttcgatctgttcctgatatccgcaacagaattttattctgttcacaatcctcaacgcagccatttagttcagctcatgccagtttttcgaatcttttacttgttgctattatcattactagtattagacactcatctgattgttattattttatattaatcagcatcagaaccagttaaaggaatctccatgttcggacctgcttcacgcaaagtaaaaatggccatgaacttcatcaaaatatattcatcaacgcgaaaatgctcgtaaattaccggagagcgtcaagcatgcagtggaatattgaaaatagccttgtatgtcctgtaacaggaacaggtttttcagttgcggcaagtgccaaaaatctgaaattaattatttggtatagtggagattattttttgagcattggttcggttattaacatcacacaaaatgaagttttcattaatggtgtgcccggcgatttacaggttattcatgcattcccctatacggaaaatttgtggtcaacattttcaaagaatattgaatgccccggtaatcagaaccctatgctgctcatctgcaatcgaagaagcctctgcaagttcgccttgtgcccctacggcgccaggcaaaagaggccgcaataaggcttccccctcattcgcgctagcgtaccggtacttattttctatgtgggcacgtgctgtcctgacagcccgtgcccacattgtgccgcatcctgttcccttaatgcgcaatgcttctgctcgtatctgaatcattgtctggctccgcaaaaaatagtcctgaaccgcagctccgggaatcatagcgaatttcatggctaatatatagctcatattaatgtccggatggtttacaatggcggtagcgaatgaataggcacctgacttcagatactgaatgcgccacctcagccgcgattcaggtacagagattcaagcgattaaaagatgagtgcaggcatacacaatatgaataaaattgttttcgttgaggatgatgccgaggtcggcgcactgattgcggcctaccttggcaaacacgatatggacgtggtggtagaaccgcgcggcgatcgggcggaagaggttatcgcgcgcgaaaagccggacctggtgctgctggatatcatgctgccgggtaaagacggtatgacgctgtgccgcgatttacgcggccagtggcaggggccaatcgtattgctcacttcactggacagcgatatgaaccatattctctcactcgaaatgggcgccagcgattatatcctgaaaaccacgccgcccgcggtgctgttagctcgcctgcgcctgcatttgcgccagcatatcgccgtgccggacggcagcgtcccctcctcgctcaccccgcataaagcgatcgcttttggctccctgagtatcgacccggtgaatagacaggtgatgctcggcggcgaaagcgtcgccttatccactgcggatttcgatctcctgtgggagttagcgacccatgctggacaaattatggatcgggacgcgttattaaaaaatctgcgcggagtcagctacgatggtatggaccgcagcgtcgatgtcgccatctcgcggctgcgtaaaaagcttctcgataatgcgactgagccatatcgtatcaaaacggtacgcaataaaggttacctgttcgccccgcacgcctgggacaattaattttggcatatggcgatggaatagctgtttgtgcggagttagccgtcagagccaattcaacctcctgttaattatttttaaaacagggggtgaaattgcttttcccacgcaaaacccgcgcttcaccgcgcggcgcgcctcacgacttgccgggcgggtgatactctttgcagacaatcaacggaaaacattctactgtggagtgatagcgctggcgcctggccagtatcgacacccgtcgtgagtatagagattcacaccttcagtgggttgggatgaccgcaatatctactgcacgggagcatctatatgttgaacgatctcagcagcgatgaaagcaaaagacgcgcggcgattgacctgttaaaaaacgcggacgaagggcgagacgaagcgttaaaaaaatacactcatctggtctgccagttgctaaaaatgccaatgagttttgtgtcaatccttgacgatgaaaagcagtacatcaaatccgctcagaatatcgcccccacggacaccagcctgggcggagcattttgcgaacagaccctgaaacagggtgagactctcctttgtcctgatacgcatcagcacccgatctttcatcgcgatcgggcggtcagagaagcgccattcattcgcttttatgcaggatgcccgctgaaaacccgcgacggagtgaccgtgggtaccttgagtatcttagatacgcaacccagggcactttcagatgagcagatcgctatttttaaggcgctggccgagctgatatcggatttcttagcctcctggcactcagtggggtatatcgacgtcgtcacgcttttacccaatcggcagcgcctgctcaaggacattgaggtgtcggcggagggtactttcaggctggtcattattgactgcattgatatgccatttgcctacgagatggcccgctcattggggatgctggcggtagagaatttgcttcgtgacatgaccgtcgcgctgcaggcgcgcctgcccatggcgagcaaactttacgccgtggcggttggacgctttgcctttttcaccccggaacccatggcgctgtcattggagggtatagcactacggcttcagggaacccaggccaggatcggcccggacgttcccctggatttgaatattcacatgggtgactccggtatttgcgatagcgacatgacgccaaatgaaattctgcggcgcgcggtgagcgcactgcatgaagcgataagccaggggcaccgttttacgacctataatgacgcactggacatccgcaagaagcgagatttcagcctgctcaccgaactcaggcaaacgctgcagggaaaccaggggttatatctggtctttcagccaaaaatttcgctgacgacgggagacgtgacgggcgctgaagccttgataagatggaagcatcctatcaatggcgaagtgctgccgggtgaatttattccgctggtcgaaaagactagcctgatgcgcgaactctcggcctgggttatcgatcatactatcgcgcagttgagtgactggcgggatcgggggctttctcttcccgtctcaattaatctcgccgccagcgatttttctcgacccgatttcgctgaggagcttgagcagaaactgcgggaggcgtgtcttgacccagccctgctgggggtggagtgtctggagactgagaagatgcttgaaagtccggccgcgctgaacggactggacatgctcaaaaaacgcgggtttaaaatttctctggatgactttggatcgggatacagcaacattaattacctgcggcaaatcccgctggacatcatcaaactcgaccggtctattgtgaggcatatagtccatgagaaagccagccgcattattgtgcacaacgttatcaggctcctcaagcagctcgattacgtcgtccttgccgaaggcgtcgaggatctcgaaacggttgagattttacgcagcctgggctgcgatgaggttcagggatatttttatgcccggccgatggtctccgttgattttgccgcatggtatcgcaccagaaaggcagaccagggaaagaaatcctgagacgaacgactcttttcaatgttctttcagtatatgaaccaatccagcgataaagacgcgcaacgggcgctgcactgaggaacacgatatgactaccttttaccaattgactgccaccagcctgcacggccagcccatctcaatggctgactatgctggcaagctcgttctggtggtcaatactgccagccagcaatatgcagggctggaagcgctctatgcgaaatacgctgcccatgggctgatagtgcttggtttcccctgcaaccagtttggtaagcaggagcccggcggcgtcgatgacatcgagcagacctgtcggatcaattacggtgtaagcttcccgatgttcgagaaagtggaggtcaacggcgccggcgcgcacccgctgtttcgttacctgaaagatgagttacccggcgtgctgggcgggcggatcaaatggaacttcacgaagttcttgatcggtcgcgacggcacccctctcacgcgtttcgcgccgttcaccaccccggagaaaatggagaccgccatccttgccgcactaaagatttaaatcttttgcctccctgaccgctgcctgtgcgcgagtgaatgttcgctccgcgccggaagtgcgcctggaaaaatgacaatgggttaggaataagtcccgcgcacgcgatacaaatcactcatttttcagcccaccacacgccagatatttctcttttctgcgagttaagccatctattaaaacaatacctgcccggcaagatgacctattcccatcgacgaaaacatcgccagggtgctccagaaagtaattctgccgatcgccctgacaggagaggctctgctgacaattgaagatatatagccaagagcggccagtgaaaaaagggaggagagaataacaaagagaaaaaccagcgttgctggagaaagccatgcaacgactaaaggcaacgttgcgccagcggaaaaactcagcgccgagaaaacggcagcctgcagggggcgcgcagaattggtatccgtcagtcccagctcctcgcgggcatgcgtgtccagagcatctttcaccatgagttgttcggcaaccttttgggcaagctctggctcgagtccgcgttgcacataaagtaaagtcagctcgcgtacttctccctgataatctgtttccagttccctcttttcctgagcgagaaccgcgttttccgtgtcggcctgagatgagacggaaacatattcccccgcggccatcgacatcgcccccgcgaccagcccggcaatgcccgccagtaaaaccccggaagagcccgtattagcagacgcaacgccaagaacaaggctcgctgtcgaaacaataccatcgttagccccgagtacagcagcccttaaccatccgacgcgttcaatgctgtgtcgttcaagatgcatgcttttattctcctttaagtacgcctgttcagcctggcggaatgagggtggaataaaacggattaaaacagagaacgcttcgcacatcggcgccgaccgaggtacattacattcttctctgatttggcttcaacccacaccatcatacttatgcgtgccggatgttgtcagccgcagcgaaccctgctttcatagcaaatcaaatgggcataaaacgcaacaagggtttttcacgtagattgcgcctggataaatgcccccgcagtgcccctgcaggtaaaagcaggaatttaaccttttgattttgagtgatatttaatgaaaaagctgtttgtgcagttttacctcctgctgttcgtctgcttcctggtcatgaccatgatggtgggcctggtgtacaaattcaccgccgaacgcgcagggcgtcagtcgctggacgacctgatgaaaagttcgctgtatctgatgcgcagcgagctgcgggagatcccgccgcgcgactggagcaaaacgctcaaagagctggacctcaatctctctttcgatctgcatatcgagcccatcagcaaattcaagctctcggaaaactcgatgcagcatctgcgcgccggggatatcgtcgccctcgacgatcagtacacctttatccagcggatcccgcgcagccactacgtgctctccgtcggtccggtgccgtatctctattttttgcatgagatgcgcctgctcgatctggccctgatggcttttatcgccatctcgctggcctttccggtctttatctggatgcgtcctcactggcaggagatgctgcgtattgagaccgccgcccagcgcttcggcgacggacatcttactgaacgcattcatttcgacagcatgtccagcttcgcgcggctgggggtggcgtttaatcagatggccgataacatcaacgcgcttatcgccagcaaaaaacagctgatcgatggcatcgcccatgaactgcggaccccgctggtgcgcctgcgctatcgcctggaaatgagtgagaacctcaccgaagccgaatcgcaggcgttgaaccgcgatatcgggcagttggaggcgctgattgaagaacttctgacctacgcccggcttgaccgcccgcagaacgaactgaagctaacgacccccaatttcccggcgtggatccgcgatcacgttgaagatattcagacggttaatccccagcgcgagattgcgctaaccgacgtcgtggccgggagttacggcgcgctggatatgcgcttaatggaacgggtgctggataatctggtgaataatgccctgcgctacagtaaccagcgtattcagatcagcctgacgctgcaggcttcgcgcgcgacgctgcgggtcgaagatgatggccccggaattgcgcctgatgaacgtgagcgagtgttcgagcctttcgtacgcctcgacccgagccgcgatcgcgcgaccggcggctgtggcctcggtttagctatcgtccacagcatcgcccaggcaatggccggagaagtgcattgcgaagcgagttcgctgggcggggcctgtttttgctttagctggccggtctatcatcagttgccggattttacctccgcctgatacgcctttgcgcaaaagctgaggcctgctatagttaaaaaatcgctaagtatgttgtaactaagatggggaaatatggccagctatgaccttgttgaacgtctgaacgacacctttcgccagctcgagcatgaactgcaggcgctaaaacacgccctgagccagtgccgcctgctggccgcccgcgtctttgagctgccgccggtgagtaaagacgcagaacaccagccgctggagagcatcaacgtggttcagcacaccggcaaaaccgcgctggagatggcgctcaggcactatagtcatctgtttatccagcagcagtcggaaacccgcagcagcaaagccgccgtgcgtttacccggcgcgatttgtctgcaaactgacgcccgggaacaggctgaactcttagacaaaatcacccatatcaacgccctcaaagcgcgcttcgagaagattatcaccgtggattccggcctgcctgccgccgcgcggtttgagtgggtccaccgccacctgccgggactgattacgctgagcgcctatcgcacgctaactcccctcctcgatccgagcaccatccgcttcggctgggccaataagcacgtgattaaaaatctcacccgcgatcgggtactcatgcagctggaaaaaagccttcagtcgccccgggcggttccgccgtggacccgcgagcagtggcaaagcaagctggagcgagagtatcaggatattgccgccctgccgcagcgggcaaagctgaaaatcaagcggccggtgaaggtgcagcccatcgccagggtctggtacagcggggaacaaaaacaggtgcaatacgcctgtccgggaccgatgattgcactgatatccggcaccaagggcgtcagcgtgccggacctcggtgaactcctgaactatgacgccgataacgtgcagtatcgctacaaaccgcaggcgcagtcgctcaggctactgattccgcggctgcacctgtggctggctagcgagtagacatactgcccaccatctcttccgggcgtacccagcggtcaaactcggcttccgtcaggtagccgagcgccagcgccgacgctttcagggttaacccctctttatgggcctttttggcaatttccgccgctttgtcatagccgatatgggtattcagcgcggttaccagcatcagcgactcattcagcaactggctgatgcgttcacggttcggctcaatgccttccgcgcagtgctcgttaaagctcgccatcccgtcagccagcagccgcaccgattgcaggaagttgtggatcaccatcgggcgatagacgttgagctcaaagttgcccgatgcgccgccgatattcaccgcgacatcgttgcccatcacctgacagcacagcatggtcagggcttcgcactgggtcgggttcaccttgcccggcataatcgacgaacccggttcattttccgggatcgcaatttcgccaatcccacagcgcgggccggaggccagccagcgcacatcgttggcaattttcatcagcgaagcggccagccctttcagcgccccgtgcgcgtgcaccagcgcatcaacggtcgccagcgcttcaaacttgttcggcgcggtgacaaacggctggccgcttaaggccgccagctcggcggcgacgcgtaccgcatattccggatgggtattgagcccggttcccaccgccgtcccgcccagcgccagctcggccagatgcggcaggctatgatcgagatgttttaaattgtgctccagcatggctacccagccggagatctcctgaccgagggtcagcggcgtcgcatcctgcagatgggtgcggccgattttgacaatatcgctgaaggcaacggctttattgttcagggtctgcttcagcacgttgagctgcgggatcagcttctcccgcagggcaatcatcgccgccacgtgcatcgccgtcgggaacacgtcgttagagctctggctcttgttgacatcatcgttggggtgaatcttacgctccatcccgcgcggcccgcccagcagttcactcgcgcgattggccagtacctcattcatattcatgttgctttgcgtgccggagccggtttgccagatagccagcggaaactcgtccggatgtttgcctgccagcacttcgtccgcggcctgaataatcgcttgcgctttctccgcggccagaaggccgagatcgttattcaccttcgccgctgcgcgcttggtcagcgccagcgcataaataagctcggccggcattttttccgtcgaaatacgaaaatgttccagcgagcgctgggtttgcgcgccccatagcttgtcggcaggcacatcgatggcgcccattgagtctttttcactgcgatgcgttgtcatgactttctccttggattcaacgtgcgtaatagcgacaaagctcacctgctcaaagggtaaagtatgggtcagatttataagttgttttggtggttcgtgccgctaagcggcataaaaaaaccgccccgaagggcggctgaaatcattttacgcagcgggcgcactgcgagctctggatttgctggaagaagtcgttgcctttgtcatccacgaggataaacgccgggaagtcttcgacttcaattttccagatggcttccatccccagttcaggataggccacgcactcgaggctgcggatactctgctgcgccagtaccgccgccgggccgccgatgctgccgaggtagaaaccgccgtgtttatgacaggcgtcggtcacctgctggctgcggttgcctttggctaacatgattttactcgccccgtgcgcctgcagcaggtcgacgtaggagtccatgcggccagcggtcgtcgggccaagggagccggacgcgtagccgtcgggcgtttttgccgggcccgcgtagtagatcgggtggtctttgacgtactgcggcaacgcctcaccgctgtcgataagctctttcagcttcgcgtgggcgatatcgcgggccacgataatcgtcccgctcagcgacaggcgggtcgacaccgggtactgcgacagcagcgccagaatatcgctcatcggctggttgaggttgaccttgaccgcctcgccctcgccggcctgacgaagatgctcgggaatatatttgcccggattgctctccagtttctcaatccagatcccctggcggttgatcttggctttgatattgcgatccgccgagcaggagacgcccatgcccaccgggcaggaggcgccgtggcgcggcaggcgcacgacgcggatatcgtgggcgaagtatttgccgccgaactgcgcgccgagaccgaggttttgcgcctccaccagcagttcctgttccagctgaatatcgcggaaggcctgaccgtgttcgttgccttcggtcggcaggccgtcgtagtacttggttgaggccagcttaacggttttcagggtggactccgccgaggtgccgccaatgacgaaagcaatatggtacggcgggcaggcggcggttcccagagtgcgcattttttcgacgagatagtttttcagcttcgccggggtaattagcgctttggtttcctggtacaggtaggttttattcgccgagccgccgcctttggcgatgcagaggaatttgtactcctcgccgtcggtggcgtaaagatcgatctgcgcaggcaggttagtgccggtgttgacctctttatacatatccagcggcgcgttctgcgaatagcgcaggttatcctggatataggtgttataaacgccctgcgccagcgcggcttcatcgccgccgccggtccacacgcgctggccttttttgccggtaataatcgcggtaccggtatcctggcaggtcggcagcacgcctttggccgcgatatccgagttgcgcagaaactgcagcgccacgtacttatcgttttcgctggcttccgggtcgttgagaatatcggccacctgctgctggtgcgccgggcgaagcataaaggaggcgtcgtggaaagcgtgttgtgccagtaaagttagcgcctgaggttcaactttcagaacttcctggccggcgaattcggcgacggagacgtaatcactgctgaggaggtagtactcggtatcgtcctttttcagtggaaaaggatcctgatatacaaacggtttattcgacattgtgctctcacttactgcttagctgattatatttcaggcagacactccatttgcccgtggaaaagcgagtcgatcgattttacacaattttttaacaaaaactgagacaaggacgactttttcttcgcgccggttgcttatcggtcgattgctggtttaatagtgccatgactattaagtggaaacagggattgagaatgcaaaagctcattaactcagtgcaaaactacgcctggggaagccataccgccttaaccgaactttatgggattgctaacccggacaacctgccgatggcggagctgtggatgggcgcccatcccaagagcagctcgcagattgtggataatagcgggacgccgcgctctctgcgcgacgcgatcgaaagcgataaagcaaccctgcttggcgcgaaagtcgccgagcgttttggcgaactgccgttcctgttcaaagtcctgtgcgccgcacagccgctctctatccaggtgcaccccaacaagcaggcctcggagatcggttttgccaaagagaacgctgccgggatcccgcttgatgccgccgaacgtaactataaagatccgaaccacaagccggagctggttttcgccttaacgccgttcctcgccatgaacgccttccgcgagtttgccgaaatcgtcaccctgctgcagccggttgccgatgcgcatccggcgattgcccagttccttgcgcagcctgacgccgggcatcttagccagctgttcgccagcctgctgaacatgaaaggcgatgaaaaagcgcacgccttacgggcgctgcaggcggcgctggacagcgaacagggtgagccctggcagactatccgcctgatcgccgagttctacccggacgatagcggcctcttctctccgctgctgctcaacgtggtcaaactgaatcccggcgaggcgatgttcctgtttgcggaaaccccgcacgcctacctgcagggcgtggcgctggaagtgatggccaactctgataacgtgcttcgcgcgggcctgacgccgaaatatatcgatattccggaactggtggcgaacgtcaaatttgagccaaaacccgcgggccaactgctgacccagccggtaattcacggcgcggagctggacttccccatcccggttgacgattttgccttctcgctgcacgacctgtcagcgcaggcgtcaaccatcgcccagcagagcgcggcgatcctgttctgcgtcgagggtgaggcgacgattgccaaaggcgaacagcgcctgacgctgaagccgggtgaatccgcgtttatcggctgtaatgaatcaccggtgcaggtcagcggccgcggccgcgtggcgcgcgtgtttaataagctccagtaagttactgaactttttagccacagttgctagactttcacccatcatgacaacacaaccaggcggcccgatccgcctggtttcatttatggacaaatgctatgaaaaaatcgctggtcgcagcaggagttatcattgcgctgggcgtcgtctggacgggcggcgcgtggtatacggggaagcagctggaaagccgcattgccgacatggtgcagcaggctaatgctcagctgcaaagcagcgcgccgcaggctggcgtggagctgacgtatcagggctatcagcgcggactgttccgcagccatttacagctggtgctgaagcctgctgccggcaaagcgccccgctggcttgccgcaggacagtcgctggtgtttgatgaagtcgtcgatcacggccctttcccgctggcttcgctcaaatcctttaacctcgccccggcgatggcgtccgtcaaaaccaccctgaccaataacgacgccagcaaggcgctgttcgacatcgctaaaggcgaaacgccgttcaccattgatacccgtatcgcttatagcggcgacaacacatccgctattgtgctcaacccgcttgattacgcgaaaggcgatgagaaggtgaccttcagcggcggacagttccagctggacgctgaccgcgaagggaaaaccctcagcctgagcggcgaagccggtagcgggcagattaacgcggttaacgagtacaaccagaaagttcagctcacctttaataacctgaaaaccgacggctctaccgaaatggccagcttcaacgagcgtatcggtaaacaggctatctcgctggacaagctggcgattggcgttgaaggcaaagagctggcgctgttcgaagggatgaaaattgacggcaattcgtcgctgactgccgacggtaaaggtattaacagccagctggactacacggtcaacagcctcaagctgcaaaatcaggatatcggtagcggccggctgacgctgaagctggacaatattgatggcgaagccttccatcagttcagccaaaaatacaacgctgaagcgcagacgctgatggcggatccgcagctggcgcagaatcctgagctctatcagcaggcgttaacgcaaaccttctttagcgcgctgccgatgatgctgaaaggcagcccgtccctgaccatttcgccgctgagctggcgcaatgcgaagggggaaaccaccctgaatctttcgattctgctgaaagacccgtcgctgaccaccaccccgccgcagacgctggccgatgaggtggatcgtagcgttaaatcgctcgacggcaagctggtgatcccggtggatatggcgacggcgtttatgacccagattgccgggctggaaggctatcagcccgccgacgccgctaagcttgcggatcagcaggtgaaaggcctggcggcgatggggcagatgttccgcatctccaccatggaagataacgccattacctcaagtctgcagtacgctgacggccaggttacgctgaacggacagaaaatgccgctggatgagtttgccggaatgttcggtttagcgcttcccgccgtctctgaacccgcagcgccgcaggaaactcagccgcaagatgacgcgccgcaagacgtggtgccacccgccgcgccgcagcaataaacggcaaatagcccctgcccaggggctattttcgggtaatcagccggggagaaataatctggtttctcgccgcgccctgtccctcttccatacgccgtaaaatacactccgcgaggctttgtcccagctcccgggcgggcgtcgtcacccaggtcagcggcagatcgtccagcgcctcctcgggtaactccgcaaaggccgccagcgcgacccgctgttcaaaatagctttcgacgccagcttcgccgctctggcgcccggcgcgcatcagcccaaaccacgccccggtggcaatcacgctgttgtagcacagcaccgcgctaatcgttgggttttgccgcagcagcgccgccatcgcctctgccgcctgcttctggctcgactcgcactccagcacccactcgctatgaaacggcaggccatacttcagcagggtggcgcagtagccgcctacccgttcggcgcgcgtcagggacgagctctgcccccccagccaggcaatgcgctgatggccgcggcggatcaggtgctcggtgacaatctgcgccgcctgcatattatccgggcggatcaggtcgacatcgtcgagatagctggcgcgggaagcaaacaccagcggcattccagcttgcgccgcgcgatcgcgcagctccgctccctggtcgatcgccccggcaatcaccacgccgtcgaccccttgcgccaccagggtatcaaaacgctggagcattttttcaccgctgtgccccccctgggtgagaaacaccattctgccctgcgactcaagcgcgtcggtcaatccggcggtcatctccgcgtagaaaggcttcgataagtcgctgacgatcaggccaataacaccgctctggccgccgcgcagcgacgccgcctggcggttgcgcacgaagcccagctgttcaatggcatgattgacgcgctcgccggtcgccgacgaaatacgccccttgccgctcagcaccagcgataccgtactgaccgacacgcccgccgcctgggcgacatcattaatagtgatttttttcgcgatagccataactgcaggccgactccctttggctgtcgataaaacgttttatcaagatactctctttataaacgttattatcgccggaatatgtgatttttatcgcactaaaatttggtaaaacgttttatctttccgtggcgttacatcctaccgataacttaaagaaccaggattcgtgttatgacggcgaaaacagcaaccaaaattaccctgtgggagtttttccagcagttagggaaaaccttcatgttacccgtggcgttgctctccttttgcgggatcatgctggggatcggcagctctctgagcagccatgatgtcctgacgctcctgccgtggctggacgtgccgctgctgcaggccgtattcatctggatgggcaaagtcggctccttcgccttcagctttctgccggtgatgttctgtatcgccattccactgggtctggcgcgagaaaacaaaggcgtcgccgcgtttgccggttttgtcggctatgccgtgatgaatctggcggttaacttctggctgacagccaaaggcattctgccgaccaccgatgccgccgtcctcaaagcgaacaacatccagaatattatcggcattcaatcgatcgacaccgggatcctcggcgcggtgatcgccgggatcatcgtctggatgctgcatgagcgttttcacaatatccgcctgcccgacgcgctggccttttttggcggcacccgctttgtaccgattatcaccaccgtggttctcggcctggtcggtctggtcattccgctgatctggcccgtcttcgccatggggattaatgccctcggccacgtcatcaatagcgcgggagatttcggaccgatgattttcggtaccggagagcgcctgctgctgcctttcggcctgcaccatattctggtggcgctgatccgctttaccgaggcgggtggaaccatggacgtttgcggccatagcgtcagcggcgcgctgacgattttccaggcccagctcagttgcccaaccacccacggcttctccgaaagcgcgacccgtttcctctcgcaaggcaaaatgccggccttcctcggcggcctgccgggagcggcgctggcgatgtaccactgcgctcgcccggaaaaccgccataaaattaaggggctgctgatttccggcgttatcgcctgcgtggtaggcggcacgaccgagccgctggaatttttattcctgttcgtcgccccggtgctgtacgttatccacgcgctcctcaccggactgggctttaccatgatggccattctgggcgtgactatcggcaacaccgacggcaacgttatcgactttgtggtgttcggcattctgcacggtctgtcaaccaagtggtatctggtaccggtggtcgcggccatctggtttgcggtttactacggtatcttccgtttcgctatcacccgctttaacctgaaaaccccgggacgcgatattgaaaccaatagtgccttcgaaaaggccgtcaccggcgtgaccggaaaatcaggctacaacgtcccggcgattctggcggcgctcggcggcgcggaaaatatcgtttcgctcgataactgcatcacccgcctgcgtctgtcggttaacgacatgagcaaagtcgacagcgccgcgctgaaagcgaatcgcgccatcggcgtggtgcagctcaatcagcacaacctgcaggtagtgattggcccgcaggtgcagtcggtgaaagatgaaatggctgtcctgatgaataccgtcgaggcataggctccgccccctccgaacaggagggggacatgatgaaggaagtgcagatgtttgatttttcaacgccggtcgaccgtcacggcacctggtgcacccagtgggattacgtcgccgaccgttttggcgcggccgacctgctgccctttacgatctccgacatggatttcgccaccgccccctgcattatcgatgccgtcagcaaacgcctggcgcacggcgtttttggctacagccgctggaaaaacgatgaattcctcggcgcggtgagccactggttcgccagccgttttcatagcccaatcgaccgcgaagcaattgtttacgggccgtcggttatctatatggtggcggagatgattcgtcagtggtcggcagcgggtgacggtattgtggtacacactccggcctacgatgccttttataaaaccattgaaggcaaccagcggcgcgtcgcggcggttccgctctccctcgacaaccatcagtggcgctgcgatatggcgcagctggaacgggtactggctcagccgcgtaataccgtgctgctgctgtgcagtccgcataaccccaccggcaaggtatggacccgcgaagagctggaaaccatggcgcggctgtgcgagaagcacggcgtaaaggtaattagcgacgagatccacatggacatggtgtgggacgaacatcagcacaccccgtggtgcgaggtggctcgcagcccctgggcgctgttcacctccggatcgaaaagtttcaacattccggcgtttactggcgcatacgggctgattgacgatcccgcggcgcgcgaaagctatctgcacgcgcttaaggcccgcgatggcctctcttccccttccgtaccggcgctggtggcgcatatcgccgcctatcgcgagggcgccgcctggctggatgccctgcgcggctatctgcaggagaatatgcgctacatcgcgcgcgaactgaatcaggcgtttcccgagctaaactggcagccgccgcaggcgacttacctggcgtggattgacctgcgcccgctggcggtggacgatcgcgccctgcaaaaagcacttattgaggaacagaaggtcgccattatgccaggggacacctacggcgatgagggtaagggttttgtccgcctgaatgccggctgcccacgtgaaaagctggaaaaaggcgtgcagggattaattgccgccctgggctcgctgcgctgattgttttcgctggccgccaacgcggtagcggcctgtctgctaccgctgactctccgctcactcatccgtcctcccggcacaataaaacgatattttgacgagactcaaaaaacgctatttcacaaaggtgtatttaaatgccgtttttaattcccgtcaaaatattcaccaggaggaaaaaatatgaacacctacgatcgtaaccgtaacgctatcgctaccggcagcatggttatggtggccgacagcggcgcgacgggcgtcatcaaagccatccacgccgagggtaaaacggcggagcagctccgccgggcggactgcgtggaaatagacggacatcaggggttatattgcccgctaaaccttattcgcctgggctttaattaatcgcaatatccgtcatctaataactgaccgcggatccgcaggcgtaaaaggccacccaggcgtggcctttgatattctctttatcgttcaatttgatcccatcgagcgttttacgttaataagcagcgtattatcgcccctcttctacccgctacgggtaatataccttctgagttcagaggcatctacatgacatggcaacagttcaaacaggcgtggctgattaaattctggtcccccgtccccgccgttatcgccgcgggtattctctcaacctactacttcggcattaccggcaccttctgggccgtcaccggcgaattcacccgctggggtgggcaattgctgcagctcgtcggcgtgcacagcgaagagtggggctactataagctcattcatctcgagggcaccccgctcacccgtatcgacggcatgatgatcatcggcatgtttggcggctgtttcgccgccgcgctgtgggcgaataacgtcaagctgcgcttcccccgcagccggatccgcattctgcaggccgtcgccgggggaatcatcgccggtttcggcgcccgtctggcgatgggctgcaatctggccgcattttttaccggtatcccacagttttccctgcacgcctggttctttgccatcgctaccgctatcggaacctggttcggcgcgcgctttaccttactgcccatcttccgtattccggtaaaaatgcagaaagtgtcccaggcctcgccgctgacgcaaaaacctgaccaggcgcggcgccggttccgtctcggcatggtggtctttttcgccatgatcgcctggggcctgctcaccgcggccgatcggccgaagctcggcctggcgctgctatttggcgtcggatttggcctgctcattgagcgggcgcagatctgcttcacctccgcctttcgcgatatgtggatcaccgggcgtaccaatatggcgaaggcgattattttcggcatggccgccagcgctattgggatcttcagctacgtgcagctgggtatggagccgaaaatcatgtgggcggggcccaacgcggttatcggcggcctgctgtttggctttggcatcgtcctggcgggcggctgcgaaaccggctggatgtaccgcgcggtggaaggtcaggtgcactactggtgggtcgggctgggcaacgttatcggttcaacgatcctcgcctactactgggacgggctttctccggcgctggccacaagctgggataaaatcaacctgctggcgaccttcgggccattcggcggcctgctggtgacctatctcctgctgctgatcgcgctgattctggtgattggctgggaaaaacggtttttccgccgccagtctctcgccccctcgaccgttaaggaaaccgcatgaaaactctggtccccgattatcgcctcgatatggttggcgaaccctgcccctatccggccatcgccacgctcgaagccatgccttcgctgaagaaaggcgagattctggaagtggtcagcgactgtccgcagtcgattaacaacatcccgctggatgccaaaaaccacggctataccgtgctcgacattcagcaggatgggccaaccatccgctatttgattcaaaaatagccagaaaaaagccggtagtgggctaccggctgtcttccgcatcacatgcgccagcccgcgcgtcacgggcctgaaaacgtcaacgattaccagcccttaaccgcatcgcctttgtaaagctgctctgctgccgcggccacctcatcgctctggtaggccttcaccaggtttttcaccttttcgctgtctttattttcgatacgactggcgaagatattcacgtaaggggaatctttgctttccacaaacaggccgttgcgcgacggcgacagcccgacctggcttgagaaggtggtattgataatcgccatggttatctgctggtcgtccagcgcgcgggtgagctgcggcgcttcaatttcgacgatttttagctttttcgggttgttaataatatccagcgaggtgggcagcagacccacgccgtccttcagcgtaatcagcccctgcttttgtagcagcagcagagagcggccgaggttagttggatcgttggggaccgccacctgcgcgccatcgggcagctgagcaaccgacgtgattttcttcgaataggccgctatcggataaacgaacgtggtgccaacctgaaccagcttatagccgcgctcctggatctgtttgtccagatagggcttatgctggaaagcgttagcatcaagatcgccattgttcagcgcctcgttgggcaggacgaaatcattaaacgtcaccacctcaacgtcgagattgtacttctctttcgccactttttgcgccaccgcccagacttcctggtcaacgcctgcgcttatgcccactttgatgtggttggggtcctgctcgccaggtttgcaggcggccagcagcagcgagcctgcgacaaccagcggtaccgcgactttttttaacgtgaagatcatattcccagagtcctttttaaaattgcctgccattcattgcaggaaaaccagcgcctgagactatagaaaatctcgggcgcgaaattaaatactgattgtctatgattaatagcgttttgctatgagcgatttcgtcattgctccctttgagagggcaatcttcccttccctcaccgtttttccttgtattgttcggtaattttctccgcttttaaccatttatcgttctgatgtacaatgacgcgcactttaactaaaaaaagagtgcgaccatgattgatttaactttgccattaaccgacatccatcgccaccttgatggtaatatccgggcccaaaccattctcgatcttggccgccagtacaacctcgcccttccggcagacaccctcgacaccttacgtcctcatgtacaggtcacccgcaatgagcctgacctggtcagcttcctcgctaaacttgactggggcgtaaaggtgctggcctcgctggaagcctgccgccgcgtcgcttatgaaaacctcgaagatgccgctcgcaacggcctgcactacgttgaactgcgtttctctccgcgctatatggcgatgacccaccagctgccggtcgcgggcgtggtcgaagcggtgatcgccggcgttaaagaaggcagccgcgactttaacgttgaggcccgcctgatcggcattctgagccgcacctttggcgaagcggcctgcgaagaggagcttgcggccctgctcgcccatcgcgatggcatcaccgccctcgacctcgccggggatgagctcggcttcccgggaaatctgtttatggatcacttcagccgcgcgcgcgatgcgggctggcgcatcaccgtacatgcgggcgaagccgctggcccggaaagcatctggcaggcgattcgcgaactgggcgccgagcgtatcggccacggcgtgaaggcggtgcaggatccggcgctgatggattatctcgccgcgcagcgaatcgggattgagtcctgcctgacctctaatattcagaccagcaccgtgccatccctggccgagcatccgctgaaaacattccttgaacacggcgtgctggcctgcatcaataccgacgaccccgccgttcagggcgtcgatattatccatgaatacaccgtcgccgccccggcagccggtttaagccgcgagcaaattcgccaggcgcagagaaacggtctggagctcgcctttttaagcgcccaggagaaagcggcgctgatccagcgcgtgcagcaggcttgatgtttctcccccgtgccagcacggggggaagctcaatcagcgcctggccagcgcgtttcgtcaggtcggcctaattcaggcacagcgtcgcccgatgcctggccgactccagcccaagctcaatcagctccataatctgaatcgcctggcttgccggaaccgggttaacgccgatgccattaagcgcatcgcgaatggcggcgtaatacgctggatagttgcccggtagcgtcagccacgactcctcggtgatttcctcgccttcggcacgcgtcagcagcccgtcgcgcatatcatacccccaatcctcctgcggcaggcgctcaccgcttttcagccgttcttcctgcggatcaaggccgtatttcacatagcttccccgcgaaccgtggatgataaagcgcgccgtttccgccgcggccaccagggttccgtgcagcaccacgcgacgctgcggccaggccaacaccgcatgaaaatagtctgtggactgggagccaggccgtagctgagccaggtcgacctgcatactcaccggcagaccgaagagatttaccacctggtccagcagatgcggggcaagatcgtaccagatgccgctgcccggcccaccttgctcgcgccagcgttgccgtacctgcggtcgatagcggtcgaaatgcgactcaaaatagccgacttcccctaacaggccttcgttaatcagcgacttcaccgtcagaaaatcgctgtcccagcggcggttatggaacacggacagcagtcgcccctcgcttttggcaatggcctcaagctcgcgagcctgtgacagtgtcacggtaaacggtttatccaccactacatgcttgcccgcttccagcgcagctttcgccagcgggaaatgggtatcattggacgtggggatcaccaccagatcgatatcggggtcgctaaagagcgcctgcggtgcggtcaccaccttcaccgcaggccagtcggccagcactttcgtttcatcgctgctcgagaccgccgccagcgtcatccccggcgtaccgctgaccagcggcgcatgaaaggttttgctcgcatagccgtacccgattaaacctacccggatagggtcactcatttttctgcccccttaacgaaatgtcgcagccgcactaacaccgcgattctgaacgcatcttcgacgcgtttgcccctgcaccggttgctcagctttacgccatttgcgcagctaagatcatgtaacacttgcgttacttcagtcgttgagtaccatttcagtctggtttcaccatttgccgtagagttatggaaaacgtttttaaccgtattgtagaacttattggctggattgttttgggcgtttcggccctgcttttagttatcgctcatcatattgataactaccagtccccgcctgccgttgatgctgttcagacgaagccgctgtcgaaataaacagtgacccgcttcgcaactatgcaaccggtttctgaaaccggttgcatagttgcatacgcctttattacactctctttatcaatcgataaggagtttcttcatgtccaaattcccgcaacactttttatggggcgccgcgaccgcggcctggcaggttgaaggcggtcacgatgccgacggcaaaggcccttctatctgggatatttattctcaccttccgggcaccacctatcaggggacgaccggtgacgtcgccgttgaccactaccatcgttttcgcgaagacgtagcgctgatggcggaaatgggtttgcaaagctatcgcttttctatttcctggccccgcctgctgcctggcggccgcggtgaagtgaacgaggctggcgtccaattttacagcgacctgattgacgaactgctggcgcataacattgaaccgatgattaccctgtaccactgggatcttccccaggcgctgcaggatgaaggcggctgggaggcgcgcagtaccgcggaagccttcgctgagtacgctcgcctgtgctatcaacgttttggctcccgggtcaaactgtgggcaacctttaacgagactatcgtctttatcggccacggttacattaacggcctccatcctcctgcggtgcgcgatccggcgcgcgccattcaggcctgccaccacgtctttatcgcccatgcgctggccgtgaaagcgtttcgtgaaatgggcgtggcgggggagatagggtttgtcaacgtgctgcagccgcacaccgcattaaccgacagtgaggaagataaacgggcgacagagatggcggacgccatccatacccactggctctacgatccggtattaaaaggcggctatcccgcagagctactgcagcagacccgggcgctgtggggggttccggtctttgaaccgggagacgacgcgctgctgcgtgacaaccgctgtgactttatcggcctgaactactatcgccgtgaaaccgtgtcggcgcagcctcctgaagtaccaaccggcggcgagccgggcgtggatgggctcttctacttcgtgcgcaacccgcaaagcacctataccgaatggggctgggaaatttggcctcagggcttaaccgacgggatcatgatgattaaagcgcgctacggtgatattccgatctacatcaccgaaaacggcctgggggcaatagacccgattatcaatggcgaaatcgtcgacgacccgcggattgactatctcagtagccatattaccgcgctggaaaaagcgctggaacagggcgccgacgtgcgcggctactacccctggtcctttattgatcttttgagctggctgaacggttataaaaaacaatacggattcgtttatgtcgatcaccagcaaaatctggcgcgtaaacggaaaaagagttttttctggtatcaaaacgttattgccagccgaggcgaacagcgttaatcttctctcccaggcgccttccggcgcctgattcagttatggaatactcttaaatttctttttaccaggccggaaacatcatctgttcttgtcaccggtatttacaaccgaaataattgcatacagtttatcttagaaaggaactgccggttgagaacaggtttactcagtatgggtatattcaacttaatttattccgattataaaatggatacgcaaatgaccgttcaggactacttattaaaatttcgtaaaatcagttcgctggaaagtctggaaaaactttttgatcaccttaactattccctgaccgataacgaagagatcgtcaacatgtatcgcgcggccgaccatcgccgggcggagctggtttctggcggcaaattgttcaacatcggcgaagtgcccaagtccgtctggcgctacgtgcaataaagactgtcatcattcacgccagttgcttatacttccgccctgcttttatttataactggcgttgaattctggagtaataatgtcttctgactctgtggaacgtattggcggatggcttctggcaccgctggcatggctcctggtagccttgcttagcgcctcattgtcgctgctgttttttgctgatgctctgatgtcttcccagacttacgcattgctgagcgcgatgagcatcgaacatctcgccctgtggatcgcctccttagcctttgcgatcgccatgtggtactacacgctgtggttgaccatcgccttctttaaacggcggaaaggggtaccgaagcactacattatctggctgctgatcacgcttctgctggcggtaaaagcctttgccttttccccgatttccgacgcgctcgcgctgcgccagctgctcttccctctcctcgccgcagcgctgcttgcgccctatttcaggcgctctcaacgggttaagcggacctttgtgaatccgtaataaccacacagttaacctgttgtcgccggtatcgatttattcgataatagacggctttttctatttcaggtcgaatgatggctgattatttactgctctttgttggcactgttctggttaacaacttcgtgctggtgaagtttcttggactgtgcccgtttatgggggtttccaaaaagctggaagccgctatggggatggggctcgccaccacgtttgtgatgacgctggcctctatttgcgcctggttaattgatacctggatccttatcccgctggatctggtctatttacgtacgctggcctttatcctggtcatcgccgtggtggtgcagtttaccgaaatggtcgtgcgtaaaaccagcccggcgctgtatcgcctgcttggcatcttcctgccgctgatcaccaccaactgcgcggtgctcggcgtggcgctgctcaacattaaccttgggcataatttcctgcaatcggcgctgtacggttttgccgccgcggtcggtttttcgctggttatggtgcttttcgcctccattcgcgagcgactggtggtagcggatgttcccgcgccgtttcgcggtaacgcgattgcgctggtcaccgcaggtttaatgtcccttgcttttatgggctttagtggtttggtgaagttgtaatgaacgctgtctggatagccgtggtcgccattagcctgctggggctaattttcggcttaattctggggtacgcctcccgccgctttgcggtggaagatgacccggtggtggaaaaaattgatgccctgcttccgcagagccagtgcggccagtgcggctatcctggctgtcgtccctacgctgaagcggtggggacccagggcgagaaaatcaactgctgcgcccccggcggcgaagcggtgatgctgaaaatcgccgagctattgaacgtcgatccgcagccgacagacggcgatgcgcaggaagccgaaccggtgcgaatgctggcggtgatcgacgaggcgaactgcatcggctgcacaaaatgcattcaggcctgtcccgtcgatgccatcgtcggcgccacgcgcgccatgcatacggtgatgagcgatctctgtaccggctgtaatctttgcgtcgcgccttgtccgacgcaatgtattgaactgcgcccggtggcgccgacgacagaaacctggaaatgggatcttcagaccatcccggtacgcattattcccgtggaacaacatgtttaagttattttccgcttttcgcaaagataaagtctgggacttcaacggcggcatccatccgccagaaatgaaaacccagtccaacggtaccccgctgcgtcaggtttcactgccgcagcgttttgtcattccgctaaaacagcatattggcgcggaaggtgaactctgcgttcagccgggcgatcgcgtcctgcgcggccagccgttaacgcgcggctggggcagaatgctgccggtgcacgccccgacgtccggtacggtggcggccattgccccccactctaccgcccacccttccgcgctggcggaaatgagcgtcattattgatgccgatggcgaagaccgctggattgaacgcgatggctggaacgattaccagaataaatcccgcgaagcgctgattgagcgtattcaccagtttggcgtggccggactgggcggcgcgggtttcccgaccggcaccaagctgcgcggcggcggcgacaaaatcgacacactcattatcaacgccgccgagtgcgaaccctatattaccgccgacgaccgtctgatgcaggattgcgcggcgcagatcgtcgagggtattcgcatccttgcccatattctgcagccagctcaggtactgatcggcatcgaggataataaaccgcaggcgatttcgatgctgcgcgcggtattagccgacacgcacggtatttccctgcgcgtgatccccacgaaatatccctccggcggcgcgaaacagctgacgcagatccttaccggcaagcaggtgcctcacggcggacgctcctctgacatcggcgtgctgatgcagaacgtcggcaccgcctatgcggtgaaacgcgcggtaatcgacggcgagccgctgaccgagcgcgtcgtcaccctgaccggggaagcgatctcgcgtccgggcaacgtctgggcgcgcctcggcactccggtcagccatctgctcaacgatgccggtttctgtccgagcggcgatcctatggtaattatgggcgggccgctgatgggcttcaccgtgccgtggctcgacgtgccggtcgtgaaaatcaccaactgcctgctggcgccgtcggcgagcgaaatgggcgagccggaagaggaaaaaggctgcatccgctgcagcgcctgcgcggacgcctgcccggccgatcttctgccgcagcagctttattggttcagcaaaggccagcagcacgacaaagccaccagccataacctggcggattgcattgagtgcggcgcctgcgcctgggtctgcccaagcaatatcccgctggtgcagtacttccgccaggaaaaagcggagatttacgcgcttgctcaggaagagaaacgcgcggcggaggcgaaattacgctttgaggcccgtcaggcgcgtcttgagcgcgataaagccgcgcgtctggaacggcataagcaggccgcggtccagcccgcggcgaaagatcaggacgcgattaacgccgcccttgcccgggtacgggaaaagcagcgtgacgcggcgcagccaattatcgtgctctccggcgccaaaccggataacagcgaagccattgccgcccgcgaagcccgcaaggccgaggcccgggcacgcaaagcgcagcaacaggcacaaagcaacgtcgccgggccgtcatccgacgccgccgttgacccgcgcaaggccgccgtcgaggccgccatcgcccgagccaaagcgcgcaaagtcgaacagcaggcggttcctgcggaagacgccgcagcggagcagcccgccgccgttgacccgcgcaaggccgccgtcgaggccgccatcgcccgggctaaagcgcgtaaagcagaacaacagcaacaagcagttcccccgtcggcagccaatgatgacgcccgcaaagcggcagtcgctgaagcaatcgcccgcgttcaggcccggaaagcatcccggcaggcagttaacgaggattaaatggttttcagaatcgcaagttccccttatacccacaatcagcgccagacttcgcggattatgctgctggtgctgctcgccgccgtgcccggcatcgcggttcagacctggtttttcggctggggtaccgtgctgcaaattatccttgccgccatcacggcgtggggagccgaagcggccatccttaaactgcgcaaacaaaatattcccgcgatcctcgccgataactccgcgctgctgaccggcctgctgctggccatcagtattccgccttttgctccctggtggatggtggtgctggggaccgcgttcgcggtgatcatcgctaaacagctctacggtggtctgggtcataatccttttaacccggcgatgatcggctatgtcgtactgctcatctccttcccggtccagatgacttcgtggctcccgccgcatgagatagccgccaatgttcccggatttagcgacgcgctgcggatgattttcactggccatacggcgagcggtggagacatgaacagcctgcgaatgggcattgacggtatcagccaggccacgccgctggataccttcaaaacctcgcttcatgccggtcacgcggttgaagagattctccagtatcctgtctacggcggcgcgctcgccggcctcggctggcagtgggttaacgtggcgtatctggcgggtggtctgttcctgttatggcaaaaagccattcgctggcatattccggtcagttttctgctgagccttgccgtttgcgctaccctcggatggctgttctccccggaaagcctcgcctcgccgcaaattcatctgctgtccggcgccaccatgctgggcgcattctttattctgacggatccggtaaccgcctccaccaccaatcgcggacgcctgatcttcggcgcgctggcggggttactggtatggctaattcgcagctttggcggctatccggatggcgtggcctttgccgttctgctggccaatattaccgttcccttgatcgattactatacgcgcccgcgcgcgtacggccaccgctgaggacccgaacatgttacaaagcatgcgtaaacacggcatcacgctggccctctttgcggcggggtctaccgggctgacggccgcgattaacgagctgaccaaaagcaccattgaagaccaggctgcccagcagcaaaaagccttatttgaccaggttatgccggctaatctttataacaacgacttgctgaaaagctgttatcaagttaccgccccggcgctgggaaaaggccagcacaaggtttggatcgctcaggatggcgaaaaaccggtggctgcggtgatggaagccaccgctccggacggctattccggggccattcagctgctggtggccgccgattttaaaggtaccgtgctgggtacccgcgtcaccgaacatcatgagacgccggggctgggcgataaaatcgaactcagaatttccgactggatcaccctctttgccggtaaagtgattcatggacaaaacgacagccactgggccgtgaaaaaagacggcggcgacttcgaccagtttaccggggctaccattaccccgcgcgcggtggtcaatgccgtcaagcgcgccggcctgtacgcacaaacgctgcccgcgcagatttccgcattcactccctgtggagactaaatcatgagcgaagtaaaagacgttattgttcaggggttgtggaaaaacaactccgcgctggttcagctgctggggatgtgtcccctactcgccgtgacctcgaccgccaccaacgcccttggccttgggctggcgacgacgctggtgctcaccctgacgaacctgaccatttccagcctgcgccgctggacgccggcggaaatccgtattccgatttacgtcatgatcatcgcttcggtggtgagcgtcgtgcagatgctgatcaacgcctacgcgttcggcctctatcagtctctggggatctttatcccgctgattgtcaccaactgtatcgtggttgggcgcgctgaggcctttgccgcgaaaaaaggcccggcgctgtcggcgctggatggtttttccatcggtatgggggcaacctgcgcgatgtttgtgctcggctcaatgcgggaaattctcggcaacggtaccctgtttgacggtgccgatagcctgctcggcagctgggctaaagttctgcgcattgaagtatttcataccgatacgccgtttctgctggcgatgctgccgccgggggcatttattggcctcggcatgatgttggcggtaaaataccttatcgatgaacgtagcaaacagcgcaaagctaaagcggtacaagccgatgtcgttgcgccgtctgatgtgacgggaaaagcctggaatgaataagagtaaacgcctggagatcctcaccaggctcagggataacaacccgcaccccaccacggagctgaattttcactcgccgtttgaattattgattgccgtcctgctctcggcgcaggccaccgacgtcagcgtcaacaaagcgacggcaaaactctacccggtcgccaacacaccggcggccatgctggcactgggcgttgagggcgtgaagtcgtatatcaagactattggcctgtttaacagcaaagcagaaaacgtcatcaagacctgtcgtatcctgcttgagcagcacaatggtgaagtgccggaagatcgggcggcccttgaggcgcttcccggcgtcggccgtaaaaccgcgaacgtggtactcaacaccgccttcggctggccgacaatcgccgtcgatacgcatatcttccgcgtttgcaatcggacacaattcgcgcccggtaagaacgttgaacaggttgaagaaaagctgttaaaggtggttccagcggaatttaaagtcgactgccatcactggttaatcctgcacggccgttatacctgtattgcccgcaaaccgcgctgcggctcctgcctgatagaagacctttgcgagtacaaagagaaggtcgatctctgaacacgcatcgcgtcattatccatcagggtgatgacgctgcttttcccccgccttcatcgacattcacgccatcattttcgcgctgttgcgggtgattatgcggttatataatcatcggccagcttattcattttttttagaggcaaaatttctatacatttgtgatcgagatcacctggtcaatttattgttgatttaatgttaacgcttttgcgtgcaaacctgctgattcaaatacccttaagttaaataccaacacaataacccatcaatttttaggattacgggctatatcactggatgcaagcgcatacagccgaacatatcgccattatgcgaaaaacttcggattccagaagataaaaactccccctttggctaaaccttgaaatttaactctgaataacatttgagtaggcggtgtattatgccgcatggaatatgtgtaacagattattgcaaagctattgcctgaaggggcaggatagtgaacattacctgccgttttccctccagaataactataaaggcggcggtctgagaagattgcgccccgaacaccccccgttaatatgggatgtaaaaaaagaggtatttgtgtcgactgcaaacaataaaccaacagaaagcgtaagtttaaacgctttcaaacaaccacgttcgttctatctcatcttctctattgagctgtgggaacgttttggtttctacggcctgcaagggatcatggccgtttacctggttaaacagctgggtatgtcagaagcggactctattactctgttctcctcctttagcgcgctggtctacggcctggtggcgattggcggctggctgggcgacaaggtgcttggcactaagcgcgtcatcatgctcggcgcaatcgttctggctatcggctacggcctggtagcgtggtccgggcacgatgcgagcatcgtgtatatgggtatggcgacgattgccgtcggtaacggcctgtttaaggctaacccctcttccctgctctcaacctgctatgaaaagaacgacccgcgtctggacggtgcatttaccatgtactatatgtccgtcaacatcggttccttcttctctatgctggccacgccgtggctggcggcgaagtttggctggagcgtcgctttcgccctgagctttgtcggcctggttatcaccatcgtcaatttcgctttctgccagcgctgggttaaacagtacggctcgaagcctgacttcgccccgctgcaggtaggtaagctgctggcgactatcgttggcgtggtggttctcatcgcgattgcaacttggctgctgcacaaccagggtattgcacgtatggcgctgggcgtggttgcgctgggcatcatcgttattttcgctaaagaagctttcgcgatgcagggcgcggcccgtcgtaaaatgatcgtcgctttcatcctgatgctgcaggcgattatcttcttcgttctgtatagccagatgccaacctccctcaacttctttgcgattcgcaacgttgaacactctctgctgggcatcgctttcgagcctgagcagtaccaggcgctgaaccctttctggatcattatcggtagcccgattctggccgccatttataacaagatgggcgataccctgccgatgccgatgaagtttgctattggtatggtcctgtgctccggcgccttccttgtcctgccgctgggcgctaagttcgccagcgacgcgggcatcgtaaacgtcagctggctggtgatcagctacggcctgcagagtatcggtgaactgatgatttccggtctgggtctggcaatggtggcacagctggttccgcagcgcctgatgggcttcattatgggtagctggttcctgactaccgctggcgccaacctgatcggcggctacgtggcgaacatgatggcggtgccggataacgtgactgacccgctgatgtcgctggaagtttacggtcgcgtgttcctgcatatcggtgtcgccaccggcattatcgccatcctgatgctcatgacggcgccgaagctgaaccgtatgacccaggacgacgataaaacggcaaaagccagcgataccgctacggcttaagctccccgggaaaacccataaatttaaaccgctaacgcgctgttagcggttttttttacccctgggcggactaacatacaggaaaccgcagccacgaggagttaccgatgaaactgttctacaaatccggcgcttgttctcttgcttcgcatatcgcgctacgcgaaagcgggctggacttcaccctgcagggcgttgacgtgatgaaaaaacgtctcgaaaacggggatgattatctgcagatcaacccgaagggtcaggtaccggcgctgctgctggacgatgatgtgctgctgacggaaggcgtggccattatgcaatatatcgccgatcgcgtgccggaccgccagctgctggcgccggtgggaagcattgcccgctatcagacgctggagtggcttaactacgtggcgacggagctgcataaaggttttaccccgctgtttcgcccggatacgccggaggattacaaacctgtcgctcgcgcgctgctggacaaaaaaatgcagtacgtgaacgaatgcctggaagataaagagtggattaacgggcaccgtttcactatcgccgatggctacctgtttaccgtgctgcgctgggcgtacgccgtgaagctggatatggaaggctatagcaatattgcagcctggatgaagcgcgttgccgcccggcctgcggtagccgccgcccttgaggctgaagggctgaagtgaagccgatgcttgcccgacgcaggtcgggcaagttgttctcacacctcttaaagctgcgtagcgctgaagtagtgctccggctgcgcgatgcgatcctgagccgccacaacctgtagttcatactcctgcatattttttgtcgccagcatgatttcatacaccgcggcggtcacgtgctccagcgcatcgcgcagtcccgcgccctgcagcagcttaaccagcagcagcccgctggtgacatcgccgacgcccaccggctggcgcatgccaaaatccaccagcggacggctgatatgccaggcttcctgcgcggtgaccagcagcatttcaaaacgatccatactcagcccggcccgcgaaagatgcttcaccagcaccacttccggcccctgtgcaatcagctcgcgcgcggccagcaccgcttcgttgacgttcgccaccggatgcccgcagaggatctccagctcaaccaggtttggcgcaataatatcgctcgccggcagcgcatagcgtacatgaaactccgcgacgccgggcgccacgatacagcccttttcagggtgccccatgaccggatcgcagaaatatttcgcggccggattggcgcttttcacctgacgcacgatgccaagaatatgttcgccctgttccgccgatcccaggtatccgcttaataccgcgtcacagcgctgaagctggttaatatcggcaatcccctgaacaatttccgtcagatgcgctggcggcatcacgcagccggtccacttcccgtattgggtatggttggagaattgtacggtattaagcggccagacgttggcgccaaggcggcgcatcggaaattcagcggcgctgttgcccgcatggccaaacacaacgtgggactggatggcgaggatattcttcatcttgattacctgagagcaaaaaataaggggcgcggtttcccacgcccctgcctttacgcaattacttccagcagaccagacagtaatttttcttaccgcgacgcagtaaggtgtagcgaccaaagagacggtcggcatcaacaaatacgtattccgggtcggactgtttttcgccgttgatggtcaccgcattggatgcgatggttttacgcgcctgaccgcgggacggctgcagttcagaatcaaccagcgcctgcatcagatcggcgcctttatccatttcgatcatcggcacgccatcctgcgccagctgttcgaaatcggcttcgctcaaatcgctcaggttaccgttgaacaggctctcggtaatgcgttttgccgccaccagaccttcttcaccgtgcaccaggcgggtcacctgttcggccagcacatactgggcgcgcggtgctttaccgctgtttttgtcttcttcttccagggcattgatgtcagccatgtccataaaagtgaagaacttcaggaagcgataaacgtcggcatccgcagtgttgatccagaactggtagaacttgtacggactggttttcttcggatccagccacactgcgccgccttcggttttaccgaatttcgtgccgtccgccttggtgatcagcggaacggtcaggccaaagacctggttctggtgcagacgacgggtcaggtcgataccggaggtaatgttgccccactggtcagaaccgccgatttgcagcgccacgccgtgcagcttgttcaggcaggcaaagtcgtaaccctgcagcaggttgtaggagaactcggtaaaagagatgccctggtcgtcgcggttcagacgctgcttcaccgcttctttgttgatcatctggtttaccgagaagtgcttgccgatatcacgcaggaatgtcagcacgttcatgctgccaaaccagtcgtagttgttggcggcaatggcagaattttcaccgcaatcaaagtcgaggaaaggcgcgacctgtttgcgaattttatctacccactcctgcacggtatcttcagtgttcagtttacgctccgcggctttaaagctcgggtcgccaatcagaccggtcgcgccgcccaccagggcaaccggtttatggccggccatctggaagcgtttcaggcataacaatggaacaagatgccccaaatgcaagctgtcagcggtgggatcgaagccgcaatagagcgcgatcgggccttgcgccagtcgctctgctaacgcttcttcgtccgtcacctgggctatcagcccccgctcctgcaattgtttaatcaagttactgcttgccatcaaattctccatctataaaacgactgcacctctgccggtacacgacttttcgccagacgcgaaaaaaatatctacgcaaaattattcaagctgcgtcgccgcggcaagcatgtgaaagcccggggaacttactcaggtaagcgacagagccaggcaggcgcagctaacaatgatgcagcttgaaaaatgaagcgtatagaataaagcgccgggccacgatgcaccagcgcttaacacaacatttttgcgtcctttatggcgccagtcggtcgatttgccagccgccgttttgccgctggtagagaaaacgatcgtgcagacgatgctcgccgccctgccagaactccatctgttcgatactgacgcggaatccgccccagaagctcggcagcggcacttcgccctgctggaatttttgcttaagctccaggaacttactctcaaggatgccgcgcgccgagatacggctggactgctgcgacacccatgcgccaatctgactatcgcgcggacggctatggaaatatttcaccacttccagcgttgaaaggcgttccgctttaccgataaccatcacctgacgttccagcatatgccatgggaaaagcaggctgatgcggggatttttttcaatctgatgggctttgcggctgccgaggttggtatagaacaccaggcctttctcatcgtagtgcttgagcaacacgatgcgctggtaaggctgcgagttttcatcgacggtcgcgacaaccatcgccgttgggtcagcgagctttgcgtcacaggcctgacgcagccagcgctcaaagagtgccagaggttcggcgggaagatcgtggcggcgcaggccaccacgggtatactcacggcgcaggtgcgcgatttgctgcaattcgtcgttatcagacatggcaattgagaaaataatcaaagggtagcgttattgtgcgcccccatggctgaaatctcaacgtttggcggtttgcagctgacagttttccagcacgatacggtcccgtttatagacggtggcgctatcgcccttcgaccagaagacgtaaacgccatcggtatagcgcgcgccagaggcggagagcccctgctgtaaattgagctgctgattatcgtaaataaagctgacctgctggcgagtatgattgagatggacggtcaacggtttctggtcacactgatactcgagggtgtccgtattcatccgctcgacaaactggttgtagtagctacagcccgccagcataaaaggtacagcaagaataagtatttttttcatcaatttgccttcgactttcccggtccgggaaggcataacgccctccctcaacgctgtccagtttacgaagaaaccggcgcgggtgatttcagttaactctgattttgcggcggattggccggaaaaatcgcgccaagcacggaagcttgcgacgcgccggtcacggaagggagattgccgggtagtccggcaagcgtccgccacgccagccatgcgaaagccagcgcctccatatcatcaccgctgatccccgcctcatcggtcgtcgatacctcggttcccggcagcagcgccgccagacgggccatcagaagcggattgcgcgccccgccgccgcataccagcaggcgttcacatcccccgctgagcagcacctgttcactgatgctgacggcggtcagctccgcaagggtcgcctgaacgtcctgggcgcgaagccccggataacgcgccagatgctgcgacagccagccgtagttaaagtattcacgaccggtgctctttggcgccggcagcgcaaaccacggatcgcttagcatatcctgcagcaacggcagcacaattttaccctcgctggcccactgcgcgtctttatcgaagggtttaccacactgacgccagacccacgcatccatcagcatgttgcccgggccggtgtcgtagccgcgcaccggcagacctggcgccagcaaagagaggttggcgatcccgccaatattgagaaccattcgacgctcaaccgggtgcgccagcagcgcgtggtggaacgccgggaccagcggcgcgccctgcccgccgagcgccatatcgcgacggcgaaagtccccgaccaccgtcacgccggtatgcgcggcaatctggttattgtcgccaatctgcaaagtatgcggcgcatcgcctgctggctcatgccagaccgtttggccatggcagccgatagcgatgatgtccgccgccttgagcttttcccgagccatcaatgccagaaccgcatcggcaaataaccgtcccaggcgcgtatcgagacgccccagctgcgaaagagtcagctgctgcccctggcagatggccaggatatcttctttaatcgcgattgggatgggataggtcaggctggcctgctgggcaaccagattttcattaattgctgcgagaacaacatcaacaccatcaaggctggtgccggacataacgccgataaagcggcctgatttcatacgctttccttcattccatgactctcgtatatccccacactccatcataaacgagggggcaaagctacgctgctataatactttttaacaatacaagcagcgctgccgattcttagggtaaagaacttgtgtttagtttaggttgagacgactctgattattattttttgtatagtcgttgcatctgctatgccagcagacgcttaaatgccatataattggctacaaggaagttcaacagaacgcttcttggtgaacaggagattcataaatgattttacgtgttttggctgtctcgatgattggttttacgcttgcaggctgcgtcagcagcagcggcctgtccggcgatgtttactccgcatctgaagccaaacaggtccagagcgtgacctacggcaccattgtgcatacccgcgcggtgcagattcagggcggagatgacagcaacgccatcggcgccatcggcggcgcggtgctcggcggcttcctcggtaacaccattggcggcggcacgggtcgctccctggcaacggcggcaggcgcagtcgccggcggcgtagccggtcagggcgtacagggcgcgatgaataaaactcagggcgttgagctggaaatccgcaaagatgacggtaacaccatcatggtagtgcaaaagcaaggcagcacgccgttctccgtcggccagcgcgtagccattgccggcagcggcagccaggtgacggtctccccgcgctaaatcttctctctgcggcccggacgggccgcttattgatataaaatacgtattatttcctcagtgtaaataaataattcatatatatttatatttttcttttatacatgcactaatttgcgcccgcgcaatattccgcccgccaccatcaagtattctccagccagtattatttaaaacattgcggcaattctgtcgttttaccttcgcatttttcaggggtgttgactatgcgcgttaatataaaaagcttaccctgccggatatttatttacgctatcgcgtgcagtctttctattgctgtggttaattttattaccacctcattaattcatcgtatctctacaacatcatccatgcttttccctgtgctaactatttcactgatgggttttcatattatgattgcctgctttatgggcatgaaatatctgtgtgataaaaaacagctgtacctggccccgatagccttcgcgtttacctgctcggccctgctgatgctgggaacgataggcagctatcccgactggctggtctgtgctcaggggcgcgagatcaatcaaaatgacgcgctgattttttattttttccgcaacgtgatgatggctgttttatttataacctcaattattttatatcgcatccgacatattaccggccactcaagaaaaattcacggtgcggtgctcagtagttgttttatttttatcagcgcaacgctcatattatcgtgggttcattcaagcaactcgccgttgctaagcattgaattcattgacaatctaacctatacctttacgccactatggcataatcgcattggctggctattaattatcatatggtcattaacgctgattttaatgatcggcctgactcggctgcgtaatatattctggtacagcggcgcctttttttgtaccgcctatatctttacgctgctggtgctgctctccacggttagcggtaacgctcactcctggaatcaggcgcggctttttgaaacgcttagcaccctgtttctgattttaattctgcttggtgacgtttttatactctatcgtgaatcaaacgaaagatacgtccgctcttaccagaactcgattcgcgatcccctgacccggctgtataaccgcagctatttctatgacaccctgactcagcgattgtcgaaggcttccgcttcacagccgctgtcggtcatcgtctgcgacctcgatcgctttaagcgcatcaacgacacctacggtcacgtgcagggagataaggtgattcagtttgctgccagcgtgttgcagaacaacgtgcgccaggacgacgctgccgcgcgtatcggcggggaagagtttgccctgctgctggtgaatatcggcgccaacgaagcgctggcaatcgccgaacgtatccgcctgtcggtcagcgagaagcaggagggattaccggagagaatgaccatcagtatgggcgtgttcaccactcaggatgcgcacgtttcggcagaagagtgcgttaagcgcgcggataccgcgatgtatgaagcgaaaaacagcgggcgtaaccgcgtagtggtctggcatgaatgaataaaaaagaggccttgagagtcctcaaggcctcgctaaggtcaatcttttgcctggagatcgagaatattgtgttcaagtttacgaatcaaattaagcagcgtttccacctcttccttagatacgccggccagaatctcatcacgcgtttttccgataacctcttccatttcgttgatcagaggctcggctttttcggtaagcttgatacgttttgcccgccgatcgttagcacaggtctggcgagaaataagccctttctcctccagctggtcgagcgtgcgaaccagcgacggctgctcaatacctatggctttcgccagctgaatctgcgactgttcaggcggcagctggtgaatgttatgcagcgtgacccagtgcgtctgcgttaactccagaggtttcaggcgatggtcgattagcgcgcgccagacgcgcaccaaacgtgccagatcagaaccaagtggcgattccaatttcatctccttataattagcttgctaagttattatactgattttagaatagtgtgcagcatttaaattaccaaaacaaatgaattacccgattcactaaaatcagaacaatgatttacaatgtgaataatcgcataacctgaacattcttcctgcaacggcaaaggatttttgcttgtgaaactgagtcttaacactgccggattgccgctccaggacctggtgttcggcgcttctgtctatttccctcccgtgtttaaagccgttttgctgggcttttttatctggttgattatccaccgccagctgcgggactggatgtatgcaggcgagatttggcatcccctgctaatggacctctccttctttgcgctctccgtctgtctggcgctggttttactgactatctggtaatgttcattacatgaagaaactaaaatacttatccacgctgctggtcgccgcgctggctattattgccgcctggctggtctggaattactacacgcaatcaccgtggacccgcgacggcaaggtccgcgccgagcaggttggcgtcacaccccaggtttccggaagcatcctgcagctcaacgtgcgcgacaaccagctggttaaagcgggagacgtgctgttcagaatcgatgacacgccttataaaatcgccctgctcaacgcccgggcgcagcttgctaaagccaaagcggaagtcgcccgcgcgcaggcagaacagaaaaaagccgccagcgatgccagccgtcggcgtcatctatcacagaactttatctcggcagaagatttagaaaacgccaataccgcgctgaataccgccacgaccaacctcgaagccgctaaggccgtggttggcgtggcgcaggccaccctcgatcacgcccaatggcagctcacgcagacggaaataaaagcgccggtcgacggttgggtcaccaatctctcaacccgggttggcgactacgccgccgttggccacccggttttcgccctcgtggatagccgctccttctacgtggtgggttattttgaagaaacgaaactgcgcaatatccgtcccggcgacagcgcgcagatcattctttatagcagcaagcagaagttacagggtcacgtaagcagcatcggacgcgccatcgtcgaccagagcgtggagagcggcggcgatctggtggcgaacattaaaccgaatattccgtgggtccgacttgcccagcgcgtaccggtgcgtattgagtttgatcatttgccgccggataccatcctggtctccggtaccacctgcaccgtagccatcggcgcgcaataatgaagctgcaggctctgacgtggcgctcgctcccgtggattaaggccagccgtccgcagtggcgctatgccttgcgtaacgggattgccatgtgcctggcgctgagcgtcgcctactggctgaatcttgacgaaccctactgggcgatgacctccgccgcggtggtcagctttcccaccgtcggcggggtgattagcaaaagcttcgggcgtattgccggcagcctgctcggcgcctgcgcggcgctgctgctggccgggcatacgctcaacgatccgtggctgtttctgttcagcatttcggcgtggatagccctctgcacgtgggcctgcgcgatgtttaccaataacgtcgcctacgctttccagcttgcgggctacacctgcgcgattatcgctttcccggttatcaatatcaccgacgcgaacgaactgtggaccatcgcccagtcgcgcgtctgcgaagtcatcgtcggtattttgtgcggcgggctgatgatgatgatcttaccgagcacctccgatggcgctacgctgctgacggcgctgaaaaacatgcatgcgcgcctgctggaacatgccagcctgctgtgggtgccggaaacgaccgatgccattcgcaccgcgcacgagagcgtgatcgggcaaatcctgaccatgaatctgctgcgcattcaggccttctggagccactatcgctttcgtcggcaaaatccgctgctgaactacctgctgcatcaacagctgcgaatgaccagcgtgatttcgagcctgcggcgaatgctgctcaactggcccaccgcgcccgcccgcacccgcgagatactggagtcgttgctcaacgcgttatctcatgccaacgccgacgccctgagcgttgcccgcatcattgctccgctggcgccccctgcggacgctgactaccggcatatcgccttctggaagcgtctgcgctacttctgtcgtctctatctggtgagcagccgctggctcaggcgcatcgaaaacgccagcgcgataacggaatttaacgtaccttccgcgccagcgctggctcgccataccgatcaggccgaagccttatggaacggcgtacgcaccttttgcgcgctggtgatggtcggcgcctggggaattagcacccaatggcaggcctgcgccgcagccctgaccctggcggcgatctgctgcgtgctctattcggtctctccttcgccgtttaagtcactaacgctgctgatgcgtaccctgatcctgctttcactctttagctttgtggtgaagtttggcctgatggtgcagataaccgatttatggcagttcttgctgtttctgtttcccctgctgaccaccatgcagttgctgaaactccagatgcctaagctcgccggactgtgggggcagctgattgtatttatggggtcgtttatttcggtgaccaacccgccggtctacgactacgcatcgtttcttaacgataatctgggtaaaatcatcggcgtcggccttgcctggctggcgttcgccatcatcagcccgggttcagacgcgcgtaaaagccgccgtcatatccgtgcgttacggcgtcactttgtcgaccagctaagccgccgcccgcagcatagcgagcatgaatttgaatcgctggtttatcaccacatcagccagctcagcaatagccaggatgcgctggcgcgccgctggctgctgcgctggggcgtggttttgctcaactgttcccacgtggtgtggcagcttcgcgagtgggaaacccgttccgacccgctatcgcaggtgcgcgatttatgcatcagcctgctgcgggatgtgatgagcgagcgcggggtacagcagcggccgctcgcctcgacgctgcaggagctgcagcgcatctgcgacgcgcttaatcaccaccaccagccggcagccaaagagctggcggcggttatctggcgactgtggtgcgcgctgtcgcagctggaacaggcgcccattgccggcaccttaacggaaagaactacttaatcacgccgcaggcgaaccgctcgccgccgccgccaaggggctgcgggctatcggacatattgtcgccccccacgtgaatcatcagcgccttccctttaacctcatccagcgtttttaagcgcggcgcgaccaccggctgggttgctttaccgtcgttattgaccaccaggaacggcagatcgccgaggtgaccggcgccgtcgggaccttcatgcttaccggttttttgcggatcgtagtgcccgcctgccgcgccagcggcgacggctttaccctctttaatcgcgggctggcagctgccgttggcatggatatggaagccgtgctcgccgggaggcagcgccttcaggtctggcgtaaattccaggcctttcgcggtttcgctgattttaacgctaccgatagcctgaccgacgctctggctggtgacaagattgatatcgacgctttcactggccgcctgcgcgcctgcgcacgcggccagggtaagtatggcgagaatacatcgttgcataacacctccttaatggctctgtcgctactaagtgtaggccattgcggaggtgatggggtttacggaacgtcgtaacctaacgccgctttgcggatacggaaccactgctggcgggacatcttcagcttttcggccgccaccgcggaacgcacgcgctctattttccctgagccaataatcggcaacggctgcgacggcaggcgcaggatccaggcatacaccacctgctcaatgcactccgcattcagctcctgagcaacgcgcgccagctcatcgcgcagcggcaggaagctgtcgtcgttaaacaaacgaccgccgccgaggcaggaccatgccatcgggcgaatacgcagctgctgaagctgatccagcgtaccgtcaagcagcggcggctgatgaaccggagaaatttccacctggttggtcgccagggtaaacggcaggcgcgactgcagcagggtaaactgggcgggggtaaaattcgatacgccgaagtgacgaaccttgccgctatggtgaagggccaggaaggcttccgccacttcatccgcatccatcagcgggtccggacgatgaatcagcagcaggtcaatatggtcggtggcaaggttacgcagcgactgctccgcgctgagaacaatatggtcgcggtcggtaatatagtgaccgatggtgttttccgcccgcgctttcgtggcaatcccgcacttggtgacaatttccatcctgctgcgcagatgcggcgccagctttagcgcttcgccaaacgccgcctcgcagcgatagtcaccgtaaatatcggcatgatcgatggtggtaatgcccagatccaggtgttgctcaacaaagcccatcagcgcctgagcggacatattccagtccatcagacgccagtagcccatcacaaaacgagagaattccggcccctgcggagccatagcaatacgctgaaccataacagcttcctcaataaaaaagtgccctgagtatacgcaattttaggcttaaaacagtgagggttgctgcggttcttccgcactatcctgcttagctgcgcgtaatttgcgcagtagccgctgtcggcacagacgcaaaacatcctgcttttgcgcatcgctcattttctgccagttgaaacgctcgtcgcggctacgcatacacccccgacagtagccgcgctcatcagactgacaaatcccccggcacggactctgtaccgggaagaattccagttgttcagccacttcgcctctcctgccgcttatctctttctttattgaagacgtttcatccgccgtacgcaaattttgttcatcagcctctgcgccaggcggcattttttaattatgacttgcattagaccaatcggtctattacagtgagcgccatgaacaagcacagtgaatgtaacacccgcgaacatatcctggccaccggcgagcagctctgcatgcatcgggggtttaccggtatgggtctgagcgaactgctgaaaacagcggaggtgccgaaaggctctttctatcactactttcgctctaaagaagcctttggcgttgcgctgctcgaccatcactacgccggatatcttcagcgcctggtcgatcattttgaccacggcgaggggaactatcgcgatcgcctcctggcctactatcagcatacgctgacgcagttttgccagcagggcatcatcagcggctgtctgacggtgaagctgtcggcagaggtctgcgatctgtcggaagatatgcgcaccgcgatggataaaggcgccagccagatcatcgttctcctcggcgacgcgctggagaaaggccgtcaggagggcagccttgcgtttgacggagacgccttaacgctctcgcaggtgctttactccctgtggctgggggcgaatctgcaggctaaaattacgcgtagcgcaacgccgctggaaagcgcccttgcccacgccaaacgtattattgctgcgcctgccgtttaacaggcgtttttatttatcccgtttcaagacgaccggtctactcaggagtcattatgtcagaatcaaagttgtttaccccgttgaaagtgggtgcggtaaccgtaccgaatcgcgtgtttatggctccgctgacgcgtctgcgcagcattgaaccgggcgatattccaaccccgctgatgggcgaatactaccgccagcgcgccagctccggcctgattatttccgaagccacccagatctccgctcaggctaaaggctacgcgggcgcaccgggcctgcacagcccggagcagattgccgcatggaaaaaaatcaccgccggcgtacacgcggaaaacgggcgtattgccgttcagctgtggcacaccgggcgcatttcccacagcagcattcagccgggtggcgccgcgccggttgcgccatcggccattagcgcgggtacccgtacctcgctgcgtgatgaaaacggccacgctattcgcgtagacacctcgatgccgcgcgcgctcgaaaccgccgagatcccggggatcgttgatgatttccgccaggcggtaggcaacgcccgcgatgccggctttgaccttgtcgaactgcactccgcgcacggctacctgctgcaccagttcctttccccttcttccaaccatcgtactgaccagtacggcggcagcgtggaaaatcgcgctcgcctggtgctggaagtggttgatgcggcgagtaaagagtggagcgccgaccgtatcgggattcgcgtctcgcctatcggcagctttcagaacgtcgataatggcccgaatgaagaagccgacgcgctctatctcatcgaagcgctggccaaacgcggtattgcttacctgcatatgtccgagccggactgggctggcggccaaccgtacagcgatgaattccgtcagaaagtccgcgaccgcttcccgggcgctattatcggcgctggcgcctacacggtggaaaaggcaaacgatctgatcggtaaaggcctgatcgatgccgtggccttcggtcgcgactatattgccaacccggatctggtcgcgcgcctgcagaagaaggccgcgctgaatccgcagcgtccggaaagcttctacggcggcggcgcggaaggttataccgattaccctaccctgtaatccctccattgatagcggcgggttatcgccgctatactcaacgctctgatgtatcaaaacaaactgcataggggacattatgcgcttacttcacaccatgctgcgcgttggcgacctgcaacgttctattgagttttacaccaacgtgctgggcatgaaactgctgcgcaccagcgaaaacactgagtataaatattcgctggcattcgtgggttacggcgaagagagcgataccgccgtgattgagctgacctataactggggcgttgataagtacgatctcggcagcgcttatggccatatcgcgctcagcgttgaaaacgcggccgaagcctgcgagcgtatccgccagaacggcggcaacgtgacgcgtgaagccggcccggtcaaaggcggcaccaccgtcatcgccttcgtcgaagatccggatggctataaaattgaactgattgaagagaaagacgccggaaaaggcctcggcaactaatcggctgcgggcacccgcggtgcctgctgttttatccccttcctgctgcaagccgcggcaaaatttgccataatgcgcgctacttttttccagctaagagaatctgatgtccgagaacgttcaacttaatggtctgtgcgaccgttttcgcggtttttatcctgtggtaatcgatgttgaaaccgccggatttaatgccaaaaccgacgccctgctggagatcgccgctattacgttgaaaatggatgaggaaggctggctgatgccggacgaaacgctgcattttcatgttgagccttttgaaggcgccaacctgcagcccgaagcgctggcttttaacggtattaaccctaacgatcccgagcgcggcgcggtgagcgaatacgatgcgctgcacgcgatttttaaaatggtccgcaagggaatgaaagagagcgactgcagccgcgcgattatggtcgcgcacaacgccacgttcgatcacagctttaccatggcggcggcagagcgggctggcctgaaacgtaacccctttcatccgttcgtgaccttcgataccgcggctctgagcggcctggcgctgggtcaaacggtgctgtcgaaagcctgtattgccgcgggaatggcatttgatggtactcaagcacactcggcgctttacgatacccagcaaaccgcccagctgttctgcgaaatcgtcaaccgctggaagcgccttggcggctggccattacccgtggccgaagagtaagcgataaaaaaagcgacttcaccggaagtcgcttttttattggcagccgaattactctgctttcggttcgtcagtcttgtacttcgcggccgtttctttgatcagctgctgcagttcgccgcgctgatacatttcaatcacgatgtcacagccgccgaccagttcaccgtcaacccacagctgcgggaaggtcggccagttagcgtatttcggcagctctgcgcggatgtccggattttgcaggatatcgacgtaggcaaaacgttcgccacaggcggagagcgcctgaacggcctgagcggagaaaccgcagcttggcagcttcggcgaccctttcatgtacagcaggatcgggttttcagcgatttgacgttggattttttctaaagtcgtgctcattgtcgtgcttccttaaacttctttacggcagtaatttgtcattgtagcgccctgggcgcaggaccgataataacatttttttcacttgccacattttatcttctgtcggcataagttgccttaaaaatatcattttattgctatacgcggcaacgcattgcgcgtttttcatgcgcgggtaccgttgacggaagcatttttttgcaaatgttaaccaaacgagacgttagatacaaaagagtagtaactctccacgattttatgctttagaatcgatgcggtttgtcattcatcgtcaggcatctgtatatgtctgtaatttaatcaggggattgctcagtggcgcgtcttaacaaaatcgcgatttcgctctgtgcattacttttcacatctatttcacttacgccgctggcgcatgcttccgggcatacgcacgcttcggccacgccaaaagcgcatccggccaagggcacgaccgcagagcgtaagaaaaaagcagccagttctaaaagtaaaaccaccgccaaaacccccagcaagaaaacgtcgaccgccagccgcagcaaatcaaccgcgtcacgccagactgccagcgccacaaaaaaatgcgttctgcgcaaaggctataaaaaactgtgcgccagttcgacaaggtcgatagcggaaagcaagatggcaaccgcaagcgtgcagaaaaagtgcgtggtgcgtaaaggctataaaacccgctgcaaaccggttgccgacgagccgcagctgaccatcgccgacgcgcataaagctcgggtacaaaaggcgcaaagcaccgccatgtccaagctgatggatcagattggcaaaccctatcgctggggcggcacctctccgcgtaccgggtttgattgtagcggtctggtctattacgcctataaggacctggttaaaattcacattccgcgcaccgccaatgagatgtatcacctgcgcgacgcccgtcctgtggatcgcggtgagctgcaaagcggggatctcgtcttcttccgcacccgcgggcgcggcactgccgatcacgtcggggtttacgttggcaacggcaaatttatccagtctccgcgtaccggccgcgacattcagatcacctcattaagcgacgattactgggtacgccactacgtgggcgcacgtcgcgtcatgacgccgaaaaccattcgctaattgtgccttgtcgctgcggcgacagggtaactctctcttttgccacatcttttaatttgctactattattaccctgcgtaatacatggttattacgcaggcaaactataaaaaggagagtagcaatgtcgttcgaattacctgcattaccatatgcaaaagacgccctggcgccgcacatttccgcagaaaccctggaataccactacggtaaacaccaccaggcctacgtcaccaacctgaataacctgatcaaaggcaccccctttgaaggcaaaaccctggaagagatcgtgcgttcttccgatggcggcgtttttaacaacgccgctcaggtctggaaccacaccttctactggaactgcctcgcgccgaacgccggcggcgaaccgcaaggcgaactggcggcggctatcgctaagtccttcggcagcttcgctgatttcaaagccaaattcaccgacgcagcggcaaaaaacttcggcgcaggctggacctggctggtgaaaaacgccgacggtagcctggccattgtctccaccagcaacgccggtacgccgctgaccagcgacgcgactccgctgctgaccgtggatgtctgggaacacgcttattatatcgactaccgtaacgcccgtccgaactatctggagcacttctgggcgctggtaaactggaagtttgttgctgctaatctggctgcataaaagcaaaccgcagaagccttgcagcttctgcggttattgtatgacttcacgcaatattaacggttggcgaacgcctcttccggctgcgcccggccgctgaacagcaccagcagtagcgccacgcccgcgataatcgcccccatcaccgggacaaaggcatagcccaggccgccagagatgaccgcgccgcccgccgccgcgcccagcgcgtttccgaggttaaaagccccgatattgaccgatgatgacagccccggcgcttcgtgggcgacgcgcatcacgcgcatctgcaaaggcggcaccaccgcaaaggtcgccgcgccccagaccaccatactgattgccgcacccacctgcgattgcgccagcagcgggatcgccagcatgataaccatcagcagcagcagaaagcccttcagcgtcccgctaacggaacggtcggcaaacttaccgccaaggtagttacccagcgagaagccgacgccaatcagcaccagcatggcggtcacaaacagcggagaggcgtgggtgatggtatgcaaaacgggagaaatataggtataaagcgtgaacatcgcccctgcccccagtaccgtcgtcagcagcgccgacagcacctgcggacgcatcagcacggaaagctcctgcttgacgtcagggcgctcgccggcgctgcccttcggtagagaaaaccacagaccgataatcgcaatcacgcccagccccgccgtggcaagaaacgacatccgccagccgatggtttcgcccagccaggtcgccgcgggaacgccgccgatattggctatcgtcagccccataaacatcgtcgccacggcgctggcctgtttgtgttttggcacaacgctcgccgccaccaccgaacccaggccgaagaaggcgccgtggttaaggctggtaataatgcgcgacagcagcagcgtggtgtaatccggagcaatggaagagagtacgttaccgagggtaaaaattgccatcaggaagatcagcgcatttctgcgcgcgcggtgggagagcagcagagtcatcagcggcgcgccgaccatcacgccgatggcataggcgctaatcagcattcccgccgccggaatcgaaacgtccacgcctttagcgataaccggtaatagccccatcggggagaactcggttgtgccgataccaaaggcaccgatcgccagcgcgagcaggggaaaattgattttcatgcagggactccatcaggccgccttccgcgacggcatctcatcagaagtcaaaagcatgacatcaatcacagaaaaacaaaagtgaacgaaatggcaaaagatttttgcgaaaatgataataatggcggagagaaagggagagcggcctctcccttaatcgcataattagtgcagtactgcagtcaaacctgcggcaacaatcaaaccaagaacaataatcgttgtcgtcagcgaaaactttaaatttgtatccatcaatttttccccctgattatccccacatgaaaagtgagcttgctcatttttacacagaatagcgtaaaaatcttccgagatttagagtgatgcacatttttgctcttcccctttgccccaagatcggacaaaatcccacgctaatttgaaagcgtatcggccattgaccccttcctgtcgttctgtgtcgttttcccgacgtgatgccatgctcaattttggcgccagggtgtgtacaggcaaacgtttacgtaccgataaacagacgatcaggtcaaggtctggagtgagaagtaatggcaactattaaagatgtagcgaagcgcgcaaacgtttccactacaacagtgtcacatgtgattaacaaaacccgattcgttgcggaagagacgcgcaatgcggtgtgggcggcaataaaagaactgcattactcccccagcgccgttgcccgcagcctgaaggtcaatcacaccaaatctattggtctgctggcaaccagcagcgaagcggcctatttcgctgagattatcgaagccgtcgagaagagctgcttccagaagggctacaccctgatcctcggcaacgcgtggaacgacccggagaaacagcgcgcctatctgtcaatgatggcgcagaaacgcgtagacggcctgctggtgatgtgctccgagtatccggagtcggtgttaagcatgctggaagagtatcgccatattccgatggtagtgatggactggggcgaggcaaaagccgacttcaccgactcggttgtcgataacgcctttgaaggcggctatatcgccgggcgctaccttattgagcgcgggcatcgcgatatcggcgtgatccccggcccgctggagcgtaacaccggcgcaggccggctggcaggttttatgaaagcgatggaagaggcgcagattagcgttccggaaaactggattgtgcagggtgattttgagccggaatccggctaccgcgccatgcagcaaattctcggccagcaccctcgcccaacggccatcttctgcggcggggatattatggcgatgggcgccatctgcgcggcggatgaaatgggtctgcgcgtgccgcaggatatttcgctgatcggttatgataacgtgcgcaacgcccgctactttagcccggcgctgaccaccattcatcagcctaaagactctcttggcgaagcggcgtttaacatgctgctggaccgcatcgttaataagcgtgaaatctcgcagtcgattgaagtccaccctcgcctggtcgagcgccgttccgtggccgacggcccgtttgtcgattatcgccgttaacctttcccgcggcgtcggtcattccggcgcccgcagccactcccggtttagcgtttcgctatcgccaaggtaatccagcagccatagcagcgccggcgaggcatcgctttgctgccacgtcaggcagcatgcggcgtccgggaaggggttctccagctccagcgccgtccatgcgccgctatcaagccacgggcgcgctaaatgcccgggtaccataccgacgcacagtccggcggagagacaggtttctgaggcatcccagtccggcaccaccaccctcttctggttatccagcagccaggtggtccgcttcggcagcgagcgcgaggtatcctccctgaccagcgacggccagttgcgcaggacgtcatcgctcagaggcccggccatttgggccagcggatggtggctcgcgacgacgcagtcccagctcagcattcccatatcgcgaaaggcgtagcggccccctaccggaattgagcgcgtcgcgccgatggccagctccacgcgaccgtcggcgagcgcatcccagacgccgttgaacacctcctgaaaaacaatcagttcgacgtcatcaaaatgacgatagaaatcaacgatcatctgccgcatgcgcgtgggtttaacgatattatccaccgcaatagagagctgcccgcgccagccgttggctatctgctggcactgctggcgggtgatctgcatttttttgataacagatcgcccctcctgtaaaaaccagacgccggccggcgttaattccacatcacgatgacggcgttcgaacagcggtaccgccagccactcctccagctgacgcacggtatagctgacggccgagggtacgcggtgcagttcctgcgctgcggcgctaaagctgccgttacgggcgacagcatcgacaacttcaagcgagtattcggaccacattttctgcctgcaaaatttttgaattcacctgacaaatattagcgtttcacaagccttaatgcactccctacactctgcgccatcgtacctgcaacaataaaaagagaagatgatgcaacaacctgggaaaggatttttagtctggctggcaggactcagcgtactgggctttctggcgaccgatatgtatcttccggctttcgccgccatgcaacaagatttgaacacttctgcggcctccgtcagcgctagcctgagcctgttcctggcaggctttgcgctgggccagcttttctgggggcccctttccgatcgctatggccgcaaaccggtgctgttgagcgggctggccatttttgctatcggctgtctggggatgctgtgggttcgcgatgccaacctgatgctcgcgctgcgatttattcaggccctgggggtttgcgccgccgcggtgacctggcaggcgatggtcaccgattattatccagcgcaaagaaccaaccggattttcgccgccattatgccgctggtcggtttatcgccggcgctggcgccgctgctcggcagctggctgctggtccattttgaatggcaggctatttttgccgtgctgttcgcgattaccctgctgctgatgctgcccgccctgcgcctgaagccagcgaacaaaccggttgccagcgcccagcagaagctcacgtttctcaccctgctgcgctcgcgcgagtatagcggtaacgtgctcatctacgccgcctgttccgccagcttttttgcctggctgacggggtcgccgtttattcttcatgaaatgggctatggcccgaccgttatcggcctgagctacgttccgcaaactatcgcgtttctggtgggcggttatggctgccgcgcggcgctgcaaaaatggcagggccagcaaattctgccctggctgctgacgattttcgccctcagcgtcgccgccacctggctggtaggcctgcgggaaaacgccacgctcgttggtttgatgattccgttctgcgccatggcggtggtgaatggcggtatttaccctatcgtcgtcgcgcaggccctgaagccattcccgcaggcgaccggtcgcgccgctgcgctgcaaaacaccctgcagcttggcctctgtttccttaccagcctgctggtctcgacgctgattgccaccccgctgcaaacgaccaccagcgtgatgctggtctccatcgtgctggccgggatgggctaccgcatgcagcacaaagccgcgcatctggaaacaaaatcgtcacatgcttaaggtaatgtgctgatagtgctaagatccagtaattagcttgctaagatatttttgttgaaagcctgtttttagcggcctatactggatccggcgtcacataaatagaaaactaattgattttaacgggagcaggatgcatcccgtttcaccatggaaggcctttcggcaagggttacctcccttcctctgttctacgtcggatagcagcctcacggattatccgtgagatttctcacaaagccaaaaaagcgtctacgctgttttaaggttctgatcacttgggcgtgatggagaagctatgagttcatcgtgtatagaagaagtaagtgtaccaaatgatgactggtaccgaattgcagctgaattattaggccgtgcgggcattgaaattaatggtcctgctccctccgacctgcgaattaaaaaccctctcttttttaagcgcgttttacaggaagggtcgctggggttaggcgagagctatatggacggctggtgggattgtgagcggctggatatatttttccataaagttttacgcgccggtctggaaaatcagcttccccatcatttcaaagataccttgcgtatcgccagcgcacgcttattcaatctgcaaagtaaaaaacgatcctggattgtcggtaaagagcattacgatttaggtaacgatctgttcagccgcatgctcgacccctatatgcagtactcttgcgcttactggaaagacgcgcagactctcgatgacgcgcagcaggcaaaattagatctgatctgccgtaaacttgagcttgagccagggatgcgggtgctggatatcggctgcggctggggcgggctggcttactacatggccaaacattaccaggtcagcgtggttggcgtgaccatctcggcagagcagcagaaaatggcgcagcagcgctgcgcggacctcgacgtcaccatcctgctccaggactatcgcgacctgcacgaaagcttcgatcgtattgtttccgtcggcatgttcgaacatgtcgggcctaaaaattacgccacctattttgatgtggtcgatcgtaatctgaaacccgacggtcgtttcctgctgcataccatcggttcgaaaaaaaccgatcatagcgttgacccgtggattaacaaatatatcttccctaacggctgcctgccgtcggtgcgccatattgccgaagccagcgaatcgcatttcgttatggaagactggcataattttggtgccgactacgacacgacgctgatggcctggtatgagcgcttcctcaccagctggccggaaatcgccgacaactactcggaacgcttcaaacgtatgtttagctattatctgaatgcctgcgctggcgctttccgcgcgcgcgatattcagctctggcaggtggttttttctcgcggggccgaacacggcctgcgcgtggcccgctaaaaatatcccccgcgtcgcgggggtattttttactcggccgccgttttcagtgccgcctctttcgccgccagcacgcgctcgacggtatcgatgaccgcctgagtctgcggatcgatttcaatattcacccgatcgcccagctttttcaccccaagcgtggtgcgctgcagcgtttccgggattaaatgaacgcaaaagcgggttggcgtcacttcaccgacggtgaggctaatcccatctacgccgatatagcctttataaaggatatatttcatcaacgtcgggtcctgaaccttaaaccagatctggcggttattttccgaggtgagaattttcaccacttccgcggtggtcataatatggccggacatcaggtgaccgccaatttcatcgctgaatttcgccgcgcgctcaacgttaacgctgtcgccctcgccgacctcgcccagattggttatacgcagggtctctttcatcaggtcaaaactcactcgcgcgccgtctatataggtgacggtcaagcagcagccgttgtgcgctacggaagccccggtttcgagccccgccagcatatgctcaggcagctccacgacgtgggtgcgaaagttaggtttttcatcgatcgccaccactttggcggtcccctgcacaataccggtaaacatattttgctcctgtataaattcgtgacggtatcagtaccgttttaggctatgacgaacaataacaggtggcaaaacaggttgccagcgcacaacgtgcagtggaattttttcactggctaaatggctaatcctcgctacaatagtctggcaaatccctctgcttttcttcttgctgccacatatggcggcttttttagtcctccaataacaacaatataaaggtgtttacgtgcagaagtattttattgaagcgcgtcagttattagcactggctatacccgttatactcgcccaggtggcgcaaaccgccatgggcttcgtcgataccgtgatggcgggtggctatagcgccaccgacatggcggccgtcgccatcggcacctctatctggctaccggcgatcctctttggccacggcctgctgctggccctgacgcccgttattgcccaactgaatggttccggccgtcgcgagcgtattgctcaccaggtacgccaggggttctggctggctggcttcgtctccctgctggtgatggtcgtgctgtggaacgccggttacattatcagctcaatgcataacatcgacccggcgatggcagagaaggcggtcggctacctgcgggcgctgctgtggggcgcgcccggctatctgttctttcaggtcgctcgcaaccagtgtgaaggcctggcgaaaaccaagccgggtatggtaatgggatttatcggtctgctggtcaacattccggtgaactacatttttatctacggccactttggtatgccggagctcggcggtatcggctgcggcgtggcgacggcatcggtttactgggttatgtttttcagcatgctcttctgggtgcgccgcgcgcgttcgatgcgcgatattcatcacacagagcgcttcagtaaacctgatttcgccgtcatccagcgtctggtacagctgggcctgccgattgcgctggcgctgtttttcgaagtgaccctcttcgccgtcgtggcgctgctggtttcgccgttggggatcgttgacgtcgctgggcatcagatagccctcaacttcagctcgctgatgttcgtcttgccgctctcgctggcggcagcggtgaccattcgcgtcggtttccgtctcgggcagggttccacgctggaggcccagacctcggccagaaccggcgtcggcgtcggggtgtgcatggccgttttcacggcggttttcaccatcctgatgcgcaagcaaatcgcgctgctgtataacgataatcccgaggtggttaccctcgcgtcccagctgatgctgctggcggcgatctaccagatttccgactccattcaggtgatcggcagcggaattctgcgcggctacaaagacacgcgttccatcttctttatcacctttaccgcctactgggtattgggactgccgagcggctacctgctggcgctgaccgatatcgtggtaccgcgcatgggccccgccgggttctggtgcggctttattattggcctcacctccgccgccgtaatgatgatgctgcgcatgcgtttcctgcagcgtcagccttccagcgtcattttacaacgcgcggcgcgctagaccgtcgcggaagcgaagccgctatccaacggcgctgattcagcgccgttttctcatgctggtgaagaaatattcttttgcatcagtaaaatataaccaatatggataaaacttctgcgatcgtgagaaatctggaagaaaagtgacgtttacctcttgccacaacccctccctcccgctaatatgcgtccccgttgccactgcaacattgcgttcatagctcagttggttagagcaccaccttgacatggtgggggtcgttggttcgagtccaattgaacgcaccataatgcgtttatagctcagttggttagagcaccaccttgacatggtgggggtcgttggttcgagtccaattaaacgcaccataatgcgtccgtagctcagttggttagagcaccaccttgacatggtgggggtcggtggttcgagtccactcggacgcaccatttcacagcctcgtgatctggtgccttttatctcccgcattgaaatatccgaaaattactttcagcactggcaatacgctattttctgatttttcccggtcgtgtccttaatatctttcaccattccgacaacttatttcccgcgcttatgtaaattgacgtaaagccctgcgccgcgtctacgctgcatttattaacgcagcggccccgccgatattccctcgcgaataaaaatctttcgttagatcataacccgttatgctgacattcattaaaaacaagcgaaacggtaacagcagtgcaattcagagtatttcaaaaaatatcaccacaaaccggtttgactgttcaaaaataacgactaaatttaatttctgaacgacaacggatacgtacctaaagcgtatcttcctgacataaactcaacaacagaggtatgaaaatatggcagaacatcgtggtggttccggtaatttcgctgaagaccgtgataaagcatctgaagcaggacgtaaaggcggtcagcacagcggtggtaactttaaaaacgatccgcagcgcgcatctgaggccggtaaaaaaggcggccaaaatagccatggcggcgggcgtaaatctgataattcctgatattaatcgcctcattctcttgtaactaaaagagtaacctgcgagtctgcggactcgcagttattctccgtttataaaggtaattaatatgaatatgaagagcatagaagacgtttttattcatcttttatcggatacgtatagcgcagaaaaacaattaacccgcggcctggcgaaactcgccagagcggcctccagcgaacagcttagcgccgcgttcaaggcccacctggaggagactcaggggcaaattgaacgtatcgaccaaattgtcgaacaagagcctgatatcaaaattaaacggatgaaatgcgtggcgatggaggggctgattgaagaagctaacgaagttattgagagcacggagaaaaatgaagtgcgggatgcggcattaattgccgctgcgcaaaaggttgaacattatgaaattgccagctacggcactctcgccactttagcagaacagcttggctataaaaaagcggttaaacttttagcggaaacgttagaagaagaaaaatcaaccgaccttaaattaactgacctggcggtcggcaatattaataaagatgcccaaaataaatagccagagagtaaaccaatattaaggagttgattatgaattatcttgaacattatcacgactggctacgcgatgcgcatgcaatggaaaagcaggcagaatctatgctggaatccatggcgagccgcatcgataattaccctgacctgcgcagcagaattcaacagcacgtaactgaaaccaaacgccaaattacggtactggaggagattctggaccgtaataatatatcacgctcggtgctgaaggattccatgagcaaaatggccgcgttaggtcaatccattggcgggatgttcccttccgatgaaatcgttaaagggtcaattagcggttatgtatttgagcagtttgaaattgcctgttatacctccctccttgccgccgcgaataaagccggcgacaccgcctcaatccccgctatcgaatcgattctggcagaagagcgggccatggccgactggctgctgaaacatattccgcaaacaacggaagagttccttctgcgctctgaagccgaaggcgttgaagcgaaaaaataagcaataaggataagagcctatgttccgacacgttaagcagcttcagtataccgtaagggtcgccgagccgaatccgggactggcgaacctccttctggaacaattcggcgggccccagggcgaactggccgccgcatgccggtattttactcagggcctgagcgatgacgatccgggccgtaaagatatgctgatggacatagccaccgaagagctgagccaccttgaaattatcggctcgctggttggcatgctcaataaaggggccaaaggcgccctggcggaaggcgtggaaaacgaagccgacctgtaccgctcgcttaccgctaacggtaacgacagccatatcacctctttgctatatggcgcaggcacgccgctgaccaactccgccggggtgccctggaccgccgcctatattgatacgattggtgagccaaccgcggatttacgctccaacgtagcggccgaggcgcgagccaaaatcatctatgagcgcctgatcaacgtcactgatgatcccggagtcaaggatgcgctggcttttctgatgacccgggaagccgctcatcagctctctttcgaaaaagcgctccagtccatcagaaacaactatccgccggggaaattaccgcccgtcaatgaatacgccagcacctactacaatatgtcagagggcgacgacattcgcggtagctggaatagcgatcggcactttgagtatgtggcgaatccccagcctgcagtcgacggcggagacggaggcgtcagcgtcaagctaagtgccgagcagcaggcgctggttaaagccatggcggaacgaacccaatccgacccggatggcgatcctcttaccggcgcagagctcggcgcaggcaagaagaagccctaatcctcaataacctgctgttaatcacttccccctgctcaattcggggggttgttctgtgatggggtccggaatatgtttgaactcgacgcgtttaatctggctcggctgcagttcgcatttaccgtctcttttcatatcctttttccggcgattaccatcggactggccagctatctggtggtgctggaggggatgtggctgcggacaaaagatgacgtctggcgctcattgtataatttctggctgaaaatttttgccgttaatttcggcatgggcgtggtttcaggcctggtcatggcttatcaattcggcaccaactggagcggtttctcacagtttgccggtagtattaccggtcccctgctgctttacgaagtgctcaccgccttttttctcgaagccggtttcttaggcgttatgctctttggctggaacaaagttcctcccggcctgcacttcttcaccacctgcatggtggcgctgggcacgctgatgtcaaccttctggatcctcgcgtcaaatagctggatgcagacgccgcagggttttaccattgaaaacggtcatgtcattccccaggactggctggcgattatctttaacccttctttcccctatcgtctgtcccatatggcgattgccgcttttctcagcagcgcgatgttcgtcggcgcctccgccgcctggcatcttctgcggggcaatgatacgccggccatacgtaaaatgttttccatggcgatgtggatggccctgctggtcgcgccggttcaggctatcgttggcgatatgcacgggctcaacacgcttgaacatcagccggcaaaaatcgctgccatagaaggccactgggagaacaaacccggagaagccaccccgctgctgctgtttggcgtgcccgatatggatgaagagcgcaccaaatacgggctggaaatccctgcgcttggcagcctgatcctcacccatagcctgaacaagcaggtcccggcgctgaaagattttccgccgcagaatcggccaaactcccttatcgtcttctggtctttccgcatcatggtcggcatgggcgtgttgatgattgccctcggcgtatggagcctgtggcttcgctaccggcagcgtctttttcactcccgcgcctttcagtggtttgcgctggcgatggggccggcggggctgctggcgctgttggccggctggatcacgaccgaagcgggacgccagccctgggtcatctatggtttattacgcacccgggatgcggtctctctccacagcacagcgcaaatgatcgtcagcctgctggtctttatcgtggtgtactgttcggtgtttggcgtaggttattactacattatccggctgattcagaaagggcctcagcccgtcagcgaattgacatcgacaacctccggtacgccggctcgccccctttccgccgcagaggccgtgcctgaagaggagactcgctaatgggcatcgatatctccgttatctggtttgtcatcatagtgtttgccacgctgatgtatatcattatggacggcttcgatctcggcatcggaatcgtcttcagctttgtgcccaacgccaatgagcgcgacgtgatgatgaacagcgtcgccccggtatgggacggcaatgagacatggcttgtgctgggcggcgcggggctattcggcgcctttccgctggcgtacgccgtcatcaccgatgcgctaacgattccgctcaccgccatgttaattggcctgatctttcgcggcgtcgccttcgaatttcgttttaaggccaccccctctcatcaaaaattctgggattactcatttgtgggcggctcgttgttggccacctttagccaggggatagtcgtgggcgcggtcatcagcggcttcgaggttgccgaccgcaggttcatcggctcagcgctggactggctgacgccctttagcctgttctgcggcttagggctggtggtggcttatacgctcctcggcaccacctggcttatcatgaaaagcgaaggcgcgctgcagcagcgcatgcgtgagctgacccgccacacgcttctggcgctgatggcggtcatcgccgtggtcagcgtctggacgccgctgggctggccgtccgttgctgaacgctggtttaccctgcctaatttctactggtttgtgcccgttcccattctggtactcgtctttagcctgtggatctggcgcctgagcgctcaccccgcgagccacgcccgccctttcctcctgacgctcgggcttatttttctcggcttcagcggcctgggcatcagtctgtggcccaatatcatccctccgcatatcacgctgtgggaagcctccgcgccgccggccagccagctatttatgctggtaggaaccctgcttatcattccggtgattttggtttacaccgcatggagctactacgtattccgcggcaaagtttccggaaatgaaggctatcactgaggtgggctatggctgactggcatacgcgggccattatctatcagattgattcagcactgttttacgatcttaacggcgatggctgcggcgatatcgccgggatcgcggcgaagctgcgctatattcgccgactgggcgcgacggtgatctggataacgcccttctacctgacgccgtttctggatgagggttacgatgtcagcgaccatctgcaggtcgatccgcgatttggtcaactggcggatatcattgcttttatcgagcaggcccgcgaattaggcatgcaggttattattgaattgctgatccagcacacctccgacgctcacccctggtttcaacaagcgcggcgcagccgtcgctcgccgttccgcgactattatctgtgggcagatagcgatgatgacaatacgccgcccatgtttcccggcgtcgaagagagcatctggtcgtgggatgacgaagccgggcaatattttcgccatatgttttaccgccatgaacccgatctcaatctggcctctcccgcggtgatcaaagaggtcgaaaatatcgttatcttttggctgaagctgggggtttccggctttcgtctggatgccgcctcgcatttgacgaaacaggccggacgcggcgaggagaaacgcgggctatggctcctggaacatctgcgtcggctggttgaacaacataatccgcaggccatactgctcggcgaagtcgacgttgaggtggcgcagtatcgcgactattttggcgataataaccgacttaatatggtacttaacttctggttgaacaaatatttttacgtcagcctcgccagccagagcgcccgcccgctgatcgacgccatcaagaaaatggtagtgcctcctgacgcctgctgcttcgcaaactggctgcgcaaccacgatgaactggatcttgaagggatcggtaacaagaacaagcagaccgtgctggatgccttcgcgccggataaggagatgaacgtttatcagcgcggtattcgccgtcggctggcgcccatgctgaacagcgaccggcggcggctggcgttctgtcatgccgtgcttttttcgctgcccggcgtaccgatcatgcgctacggggatgagatcggcatgggtgacgacctggcgctggaagagcgctacgcggtgcgtacgccgatgcagtgggccggttcagcgggcggcggcttctccgcagccgatccgcagacgtttgtggctcccatgatcgaccgggggccgtttcgctatcagaaagtcaacgtcgctgattccctgctgcaccgccattctctcctgcaccgtattattgatatcgccaatacgcggtcagaattcccggaaatcgccgttgcgcctttccgcatcattagcaccgatcggcaggcgattctcgggatctgctacgatgaccgcgagcgcagcgtcatcgcctttcttaatttcagtgataaaccgctgcgttttaccgcgaaagggatctatgcggcggtgtggacgccctgcctggccgacaaaacctacgcggacgcgctcactcccggtaagcacgctaagctggagattagcgcatatggctatcgatggttctggaccaacagtagcgcgctgcgttagcgttttttacgcgagataaaccattttgctaaaagtacccccgccgctgccgcgccgcccagcagcgcttttcccggcacgccggaagtgatggcggtggcgcgatatttcgcctcagaggaaaaacgcccgtgcgttttatgcaatccgctgaccggctgttcgagatagtcctgacggtcgtcggcattcaagcgccgggtcatttgcccttcccacgcttttttgaccatcagccggtcaaggaagcccgggaaaagaaattgcccaataatggactgaatcgtgctgctccctacccagagttcgcgtacgggccggcgcgcgacgttgaagatagcctgggcggccacttccggctgaaataccggcggcaccgggcgcatcgcccaggcaaacttattgcgcgcccactcgaactgcggcgtattcagccccggcatctgtaccatcgcaatactcacgccgctattttcatgcatcagctccgtacgcaccgcatcggtaaaaccccgaatcgcggcctttgccccgcagtaggctgactgtagcggaatggagcgataggcgagcgcggagccaacctggataatcactccgcgatcccggggcgtcatcagcgccagcgcggcgcgagtcccgttgacgtagccgaggtaggtgacctcggttacccgtctaaattcgtcgtgggtcatcgctctgaaaggcgccagcaccgcacacatcgcgttattgacccatacctcgatagccccgagccgattttcgatttcgccggcggcggtcaagagcgcatcggcatttgccacatcggcctgcacggtatgcacccgaacgccgcaacgaaggagctcctgcttcgtcgcctcaaggcttcggccatcgcgggcaataatgccgacgtcatagcctgcccgcgcaaagcgcagggccgttgctttaccgactcccgcagtaccgccagtgatcgccatgactgccatataaacctccgtaataaaagcgttatgcgctctgccagccgggcagtttctcgatgagcatcgccagtgaatagcgtacggctttctccacaacatcctggcactcgccggaaaacagcgttttatgcgcgtcgatactgccgcgaaaattccacgcgaaccagacggtccccgcaggcgtcccgtcatcgccgccgtccggccccgcgtatccgctaatggcgatactgatatccgccccggaacgcgccagcgcgccggtggacatctcttcaacggtctgccgactcacggcgctatatttctccagcgttgaggcgttgacgtcgagaagctgctgtttcgcccgatcgctaaaagtgattaagccaatatcgtagaatgcggccgtatccgcttccgcgcacagcgctgccgccaggctaccgccggtgcaggattccgcggtggttaagcgtaaacgacggtcaatcagcacgctggcgacctgtttagtcagctcgccggtggttttcgcctggttataagggttatttgacataaaaagacctttttaactctcagcaggaataatagaaatgtggccattccgttccagtatggcatatttgattttacttaattccgtaataccctgattctgccgcgcggcgaccagaatatcatcacaggagacgtccacttttttcagcttgtcaattaacggcacgccattttcgactaaaatcaccgggcaaccatcaagcgctgactctgcgccagcggtatatttcttcattaatccgaaaagcatatccacgaccaccagcgtcataatcgtcagcattgcgccggtcaccgaaaaatcgttccccagcagcgcctgctgggtagcctcgctgataataagtaataaaatcagatcaaagctggtcatttgtaatagcgcccggcggccggcgattttaaacaccaccagcaaaattaaatatatcgctaacgcacgcaagaccatctccatcgcatcctcctaaggataaataaattgccagaagcggatttcgggttcgccgtttagctgcaaagagtggttcaacttacctgggcgggtgggcgtaacgtagagccatatagaaaaattattcatgcttttcagatcattatagaccagaaagagccggtcgttctgactgtacatcctgtctggccggggccagatactgtctggttcaaaagaagaggtaaaatcaccgccaaggctaaaaatatatttatccgcgacccgcggatgggcggtaatctttagcctgaattcagtttgcaaacgaccgaagcggtcataggccaccgttaaattgcgctgcgcagttgttttttcggcagtgctaaaatatcctccagaaaagagtcccaaaagggctgccagtatgatcgccaataatattccgaggcctatctggcgggcagcgcattcaaaattaagaaaaaaatcgttctctttaatcccgggcagcctctctttttcacttgccatttttcacctcaccgttgcgcttattatcggggcgccagtttaagaaatagcaacccggcttaatatgtcaagttcgacgcgccaaagccggattaatagcaaaacgcgacatctcgcttgttattcgttgagcagcatcagcatctgtcatacggcgtaatgtttgtggacttcatcaatatcggttatcgaaaagatatcaatgccggttccctggggactatgctcatgtggaaaaatctcaccgcactataccaagaagccgccgagaataatctgaatctgtactactcatatggcatgatgtcaggtgaatacaaaacccgatggtgtcacccggtttcattgggacgatcaatcatctgaatcctggtggggtcaatccccatcagctttttgtcatctgcgttatccagcctgttaagtcgttaatatgtataccccgaggaagaggcgcgccagcaattggccctcttcctcattttgaaccacaattattgggccagatttccgttacccggaaatgatctatcgtggagcttttcaactggcggaaggccaccgacaacaaatgtgataacaacaacggcgggtcagtcattatgaagaaaattgccattatcggtgcaggtccaaccggaatttataccctgttctcattactcaagcagggcgagccgctggacgtgtcaatttacgagcaggccgaggaggcgggcgtgggcatgccctacagcgatgaagagaattcgcgcatgatgctggccaatatcgccagcattgaaatcccccccattcagagcacctatctcgactggctgaaagcccagagccggacgcaccttgcgcgctatggcgtggattacgacgctttgcacgatcgtcaatttttaccgcgcatcctgctgggtgaatactttcgcgaccagtttcttgcgctggtcggagaggccagggagcagggctttcgcatccgggtcaatgagtcctgccgggtcagcgacctgcaggcgaccgaagaaggggtcagactgtgggtcgaggatgagccggtcgctgaagcctttgacctcgcggtgatcgccaccggacacgtctggcccgatgaagaagagtcgacccgcacctggtttcccagcccgtggtctggccttatggaggccagcattcccccctgccgggtgggcattatgggcacctcgctaagcggaattgacgccgcgatggccgtcgccgtccagcacggtcggtttatcgggtctgacgatgacgccctcgccttcaggctggacgaggcaagcgaggcgctaagcatcgtgctgatgtcgcgctccggcattttgccggaagcggatttttactgccccattccctgggagccgctgagcatcgtcagcgaaagcgcgatggaacaagccatcgccgcgggcagcgacggtctgctcgatcgcgtctttgagctggtggcgcaggaaatcacgcttgccgaccccctatggagcgaaaatatcgcccttcacagccttaacgccgacagctttagcgaggcgtggtttgctaaacgccagaagcataatccgttccactgggcgctggataaccttgaagaagttgagcgcaacaagcgcgcgcgatatacggttccctggcgctacgcgatcctgcggctgcatgaagccgttcaggcgatggtgcctcaccttaatgaccatgaccgggagcgtttcaaaaatggccttgcgcgggtctttatcgactgctatgccgccattccttcggagtccatccgccggctgctggcgctgcgcgaagcgggcgtcatcagtattctcgccttagggcatgactatgagatggcggtagagcaggaaaaaacggtgattaccagcgaacaaaatcgctatacgtttgatgtgtttattgatgccagagggcaaaagcctctgaaaaataaagatcttcccttcccgcatttaagggagcagctgctggcgaccggagaagagattcctgatgtcggtgacgactatacgttgcgggaaccgcccgaagtacgggggcgcatcgcgttcgccgccattccctggctgatgcacgaccagcctttcgttcagggtatcaccgcctgcgcggagatcggcgcggcgatagcgaaagcgatatcccagccggcaagccgctcgcgcaggcgtttatccccgctcgatctgtaggaaagaaaaatagccgcccgttgacgggcggctattgttaacgcttttcaggctggggatgccagggatcttttttatgatcttcgctgtcgtctcttttacgcggcacttccccctgctcgcgcgggtcctctttcgacggatgacggccccgcttatccgggtcggctggatgctgtacggacatcaattcctcctgcttgagcggttatttctggatccggtccacccgcactaccggcggcgtcatttttttatcgaggctgccgttgatgctgatcatctgatcgggcttcacttcgcggccatcaaaaaccgcggcggggataatcactgcaatggtgtcggttttatcgcgaaagctgtagcggtcattaccgtgctgctcgataagattgccgcgtaatgagatggttgccccatcgtgcatttccagggcctggcgcacggtcataattcgcccgtcctccgtcccgcggtagccatcgtcaattttatgcggtggcggcggagcggcatcttttttaaatcccccgtcatccgcggcataaacgccctgagccattagcgcacagaaaataacggacagtaattttttcatcaaccatacctccggcatatttttgtcttgtcttaataagtctggttgctgatgttcattttcacaagttccgtacctgatgaatcgcccgggaaatattttttacgacttcaccgcccgcgtaaatatgcgcaccgggcagcattaaaaaggcgctaaatataccgtcgggcttgcgatagaataatcctaaaatgccaaacgctgctggtgcctctcattttgaaaagtttcccggcaatcagtaaattaccgttgggaaaggaatcaaagcgccaaaattataaaagcgaagccgttcaattattcttcaatattccacggcaggctgaccaggcaactacgcttactcttttaacacgaggaggtcagtatgagcgacaacgctaacaataccgagaagtatccccgtcccccctttgttgaccagccgcaatcgccgccgggtcttgccgaagagatgaagccgcagccggatcacggtgagctgagctatgtcggttccggtcggctcgccggtaagcgcgccctgattaccggcggcgattccgggattgggcgcgcggtcgcgatcgccttcgcccgcgaaggcgccgatgtggcgataaactatctgccggaagaggagtccgatgcggaaaccgtagttgccctgattcaggccgaaggacgtaaagccgtcgcgattccgggagatgtgcgcgacgaatccttctgcgaaaccctggtggaacaggccgccagcgaactcggcgggctggatattctggtcaataacgccggacgccagcaatattgcgaatcactggaagaactcaccaccgccgactttgacgccaccttcaaaaccaacgtttatgcggccttctggatcaccaaagccgccctgcgtcatcttaaagaacacagcgcgattattaatacttcatccgtccaggcctttaagccgagccccatcctgctggactacgcgcaaaccaaagcctgcctggtggcgttcacgaaatcgctggccaaacagctggggccgaagggtatccgggtaaacgcggtcgcccccggcccctactggacggtgctgcagtcaagcggcggccagccggatgagaaggtgcgtcagttcggcgccgatacgccgctggggcgtcccgggcagccggtggagattgcgccgctgtacgttacccttgcctctgatgcctgctccttcacctccggccaggtgtggtgctccgacggcggcgacggcgtgctgtaaatcccgcgcggcggcgcgccctcagcggtgcgccgtcgtcttaagacaggcgaggtatttctgcgctgagtctaaaacgatctgccgggcatttttggggacgttctgccccttaaaggcgccgtacagcgccccgaaaggcgtatcgcccagacgttcaacgatcttctccacgctggcggccgccaacggcagcaaattgggatagctccacataaacgaaacggcgcgcccccccggcgtcacctggataatatcgcccgccagcataataccgtcatctttcgcccagtgcagaacggttcctccggcgaaatggccgcccaggcgcagcagccgcaccgccgggaggatctccagcgcatctccttcccatagcgtgatggccgggctatcgcgcataatccattcgcgatcgctggcgtggagataaattcgcgcattaaaggcgtcggcccagtcctgcatcgtggtgtagtaatgaggatgggagatggcgatcgcgtttatcccgcccagggcggtaatcagcgttttgctggcggcatcaagattggcgatgcagtcccagagaatattcccctgcggcgtgagcagcagaaacgcgcgctgaccgattgcaaatttcggtaccgtcctgacgctcaacagccgatcgttatgctgctgccacgtattcgtatgcgtctcggtcagatcgtctggcttgatccagacctgcccgctggccgggacgtactggcgttcatcctcacagatacgacaatggttcagggtgttgccgcgatcgtcataagacgtcccgcaggttgcgcacagcttaatcatcacttctccttaagaaatcattcaggaagccgtaatgagtatggcagacaggaaatttatggcaggaggtgggcatctcagggcttccgtgccctgaaagagaagtttattcgaaataaacgtcagggttttccgacagcgacacaaaggttttgctgtttttatccagcgcgcgaatgtcaccgctttcaatatcgtagaaccagccgtgcagacgcaacgtgctatcccgcagacccacggcaaccgacgggtgggttttaatattgttcagctgggcgataacgttttcctgcaccataccgttgactttatcggtctcgttggcccaggttttcttctccacgacggctttcgctgcatcggagtagcgcagccagtgggacacggcaggcatggggtccaggcactggcaggtggcgatggctttcatcgcgccgcagttggagtggccgcaaatgacgatatcggtcacgcccagggccacaacggcatactcgatcgtcgcggaaaccccgcccggctcaggaccgaaagagggcacgatattcccggcgttacggatcacaaacagctggcccggctcctgctgggtcaccagctccggcaccaggcggctatcggaacaagagataaacagcgctttaggattttggctggaggccaggctgcggaagagctctttacgttgcgggaaaatctctttctggaagttgaggaagccctcaatgatatgttgcatagcagtgtctcttttctctgttttaatgacgatatgacaaagatcacatttagccagtttatcaccgacgcgcgaaatgggaatcgttattcgaacaggcgatgaaacatcgcgccgtaaagtcgggtgacagcacgctaaagattgtttattttttgacggtgaaacaatcatgagcgggagccggatgcgactttagcgctcaacatcaaccaggagcgtttatgtttttatccagcctgatggccattgccgccgtactcattatgggcgtgatcagccccggcccaagctttatttacgtggcccgcaacgccgttgcgcgctcaaggatgcatggtctggtcaccgcgctgggaaccgggacgggggcggctatcttttcgattatggccatgatggggctgcaaaaagtgctgaccgcggtgccggaaatgtttattggcctgaaggtcgcgggcggcctctatctgctctggctggggtataaaatctaccgcggcgcggcgcagccgatggattttgcggcaggcggcatggcggcggaacattccctgctgaaaaccttccgcgatggcctctatacccagctcagcaacccaaaaacggcgctggtgttcgcctctatttttaccgccctgctgccggagcgcatcccgctggccttttactatatcgtgccgctgatgagcttcctgattgacgtcagctggtattcgctggtagccctggtgctctcttccgcgcgaccgcgcagcgtctacctgcgcatgaagcgtaagatcgatatcgtcaccgccacggtgctgggcgcgctcggcctgcgcctgattgccacttcgctgtcaaagtaggccagcaaaccgtttaaacggtataaatacgaatatcgtgttcgctaaacgcgtcgcgatattcgcgactgatattctcctcgaccaccagcacgtcaatggcgctgctttcgaccaccacaaagcgcgccaccgcagggattttgtccgaggtcaggccgacgatgatttcgctgcactgttttatcaccgcttttttaaattcacagtcggcgtagtcaaagcccgtcagaccggactcaggcgccatggcgcagccgccgataaatccctgttcgaagagcatgccctgaatctgcgccacggcggaggcgcccacgcagccgccgctggcccgctggatctgacctccaagcatcaccacatcatacagcggttttttgagcagtacggcagcgatctcgggagaattcgtgaccaccgttaacgccagctccgccggcagcgcttccgccatcgccaggttggtggtgccggtatcgataaaaatgcagccgccgggcttcaccagctttgcgcacttctgcgcgatcctgctttttgtcgccgtatttttttctttgcgctcgctatagtcccccgcctccggcagggtcatcaccgcgccgccgtagacctttttacagtacccttcgcggctaagttcatgtaaatcacggcgaatagtatgctcggagacgttaaggcggctggcgagttcggcgcaaaccaccctgccgttctcctgcaggatctggcaaataagcgcttgtcgttgtttaggaaaagcagcataatcgagcacaaataactcctgataaaatctttatcgagcaacaaagtgcataatcgtgcattcagcccctgactgtcaatacaccctataaagaggtttgctatgaaaattgcccacatcgccctatggacccgccagcttgagcaacaggcccgcttttgggtggccttcttcgacggcgagattaatgagaagtactgcagccaaaccaacccgggctttgagtccttttttgtcaagattggcgacggcattgccattgagctgatgaccaagccggggcttgtcgcgcagacggcggataacaaccacaccggctgggtacacctggcgattaccgttggcggcgctgaaaaggtggatatgctggcaaaccgcgccgctgcgcaggggattctggtctcgccgccgcggaccaccggcgatggctattatgaagcggtgattaaagaccccgatggcaacctgattgaaatcgtcgcatagtatcaggcactgactcaacaggagacgcccgtggccaactatcgcgtaatcgacaaacaaaactggccgcgaaaagatcattttgatttttatcgcggttttgccaaccccagctttaatctctgcgttcctgtcgaagcgcagcggctatatgagtgcgcgaaagatcgcggcgtctcgtttttccagctggcgctctacgccctggttcgcgcggcgaacggggtgccgcagctgaaacagcggcagttgggtgacgatattatcgaatatgaccagctggcggtaatgacgccggtgatgaccgcccaggaaggctttcgccaggtctggtgcgacaacgccgccgattttgccgccttcagccatgccgccacgccgaacattgaagcggcgaaacataccgcgccggcaccgcttatcgtcaacggcgagaatttcttctgcgccagctgcctgccgtggctgcatttcagcgccatcactcacgcggagtattacgtcggcgcggcggtgcctgccctcacctggggcaagctgaaaaacggcattatcccggtggcgggcaaattcaatcacgcctttgttgacggcctgcacgccagccgcttctttgcccgggtcgaagagggtttcgccgagccggagaccctctggcagacgccataaacatttggcttacgtcacggggctgcccgcgatcgctgcacactacatactgcttaccgcggcattgcggccggatggcagcccttcaccccgtaaacagcagagaatgctggcgcttagcgcaaaaatgacagattaattctgaattattgctaatgctaaatcgctataagccatagcttttcggtgttagacagggcgcggtgcgcctcttatctttcgtcatgatttgtaaatattttacgcaattctttgatgagggagcacttttgtccagactactgcacgggttaaaaagcaaacagacgcggttcgcgcttgctctgaaaatcgcgttgctcggcggcgcggtggcattttcttcggtcgccatcgccgacgacattttaaaagaagggatcaccccggccagcgatgccagccagatccccgcggccgcgaagctgcgcaaagataccgtcgtggccggcatctccgagccgcagggcatttttaacccctacttcttcgtcaacggctgggatgagaacgtcaccaacgtgattttctctcgcctgatcgactgggacagccacggcaatctggtgccgggtctcgccgaaagctggacggtgagtccggataacaaggtctacaccatcaagctgcgccccaacctgacctttagcgacggttcgccgctgaccgccgacgatgtcgcctttacccttaccgtgctgctggatccgaaatacgacggcgataccgatatcacgctcgccaatattgccggcggcgcggagtacaaagcggcgaaagccgatagcgtcagcggtctgaaagtgcttgaccccttaacgctgcaggtgaccaccacccagccgggcgcgacgacgctggcaaaaattggcggtccggtactctccagagcctattacggcaaaggctaccagcgcggcaatctcgactatctgcgcaccctgcacggcaaaccgctgggcaacggtccctacgtttacgacaaatacatccccggccaggagattcgtttccacgccaacagccatttttatcgcggtacgccgcccactccgcgctttatctatcgcgtgaccaacccgtcaaccaacttccagctcttccagacgggtgaaaccgactacgacgcctttacctcgcgtcctgacgatatcgaacagctgaaaatgctcggctttgccaacatcaacctttacggctccagcgactacagccaggtggaatttaacgtccgccgcccggcgctgaaggacgtgaaggtacgccaggcgctgatttacggcctcgaccgtcagaagctgattgatgtggtctaccagggctacggcaaggtggcgattgagcctatcgcgccgatctcctgggcatggaacgccgagggggtgaacccgtatcactatgacccggcgcaggcgaaaaagctgcttgacgaagccggctggaaaccggggccggacggtatccgcgtcaaagagggcaaacgcctggagttaacgctgctggtgagcaagaaagtgctcaacgatgcgctgatccccatcgccaaagagaactggcagcagatcggcgtcctgttaaaaccgcaggtcgtcgatttcaacgccctgatggcgcagcgtaagtcgggtaattacgatctggcgtcgttcagcaccagtacccttaacgacccgcatgatggcgtgtgggatttttacagcgcggaagcgaaagagtccggctataacaacccgcaggtcgataagctgattaccgaaggtaactcggtgctcgaggtcgagaaacgtaagcctatctaccaccagctgtatcaggtactggcgcaggacccgccggtgatccttctcggctaccgtgaaattctctcggcgagcagcgcccgggtcaccggcttcaaaccggatatctacaacggcctgaccggcagcctgccggatgtcaaaatcgttaagtaaatccccggccgccgggatgaccggcggctgacgtgagaatgtcatgagaaatttcatcctgagacggctgctgcaaacgctgccgatgctgctgctggcctccttgattatctttatgctgtttgccaaaacgccgggcgattttatcgacggcaatatcaccctcacagctgcccgcgccgccgaactgaaagccatttacggcctggatcagccgctgctcacccgctatatccactggctcggccagctgctgcgcggcgatctcgggttttcgctgcagtaccagatcccggtcagccagctgctcaaccagtacatctggaactccttcctgctggccagcgtggcgctggtgttttactggggaattggcctgacggtgggcgtggtctcagcgctgaagcccaattctgcgttcgatcatctggtgagcgtcgcggtgttcgccgccatgtcgttcccgaccttttttctctgtctgctgctcatcaagtggttcgccgtcgacctgcactggctaccggtgggcggcatgaccaataccggcagcgacgacagcggctgggagtatgtgctgcaggtcgccgcccatctggtgctgccggtactggcgctggtgatgctccaggcgggcagcctgacccgctattttcgcgccagcatgctcgacgtggtgaaaatggattttatccgcaccgcccgcgcgaaagggctgcgcgaacgcacggttatcctgaagcacgccctgcgtaacgccctgctgccgatcatcaccctgctcggcttcgagctgccggggctgttctccggggcgatcattaccgaaaaagtgtttaactggccgggggccgggcatattcatatcgattcgctggccgcccgcgactacccggtgttaatgggctttaccctgtttctggcggtgctgaccattcttggcaacctgattgccgatgtgctttacgcgtgggtcgacccgcgcattcgcgtgaggtcctgatgctcagctctctgttttctgctaaccgacgcctgcgcaaggcggaaatcccggcgctggcgcaggtgaccccatccccctggcgtcaggcctggcaggcgctgcgccgcaatcgcctggcgatgctgtgcctgctgctgctggtcgtaatggccctctggtgcatactggggccgctgtggtcgccgtggaaagacgatgccaccgacgcgctgatgattaacaggccgcccggcgcggaacactggctgggtaccgactttctcggtcgcgatatttacacccgcctgctgctggccgggcgcatttcgctgattatcggcctgctgaccatgctgctgtcggtcacccttggctatctgctcggcgcgctgtcgggctacgccggcggcctgaccgataaacttattatgcgttttgccgatctggtgatgactatccccggcctgccgctgctgattgtcgcgggcgcgatgctctcggagctcgatttctcaccggactcacgcatctatatggtggtgattatgctgagcctgctggagtggccgaagctggcgcggctggtacgcgggcagtgcctctccctgcgcgagcgcgactttatgctggcgacccaggtgctgggactgtcggcgcgacgccgtctgtttggtcatctgctgccgaatacggtaccgattctggtggtgatggcaaccatggcggtggcgaacgccatcctcagcgagtcggcgctcagctacctcgggcttggcgtggtaccgccgacgccgtcgtggggcaatatgatggacgccgccaacagcctgatcgactttcagcgccggccctggctgtggatgccgccggggatcgccatttttatcaccgtcatcgccatcaacgtgctgggcgacggcctgcgcgacgccatggaccctaaaatgaaacagaggctgaaatgagtcgcgcattaatcacctttaatcagctttcggtctcttttgccgccgacaaaaaccgggtacgcgcggtacaggatgtgtcgttcactattcgcgccgggcagaccgttggcgtggtcggcgaatccggctgcggcaaaagcgtcaccgccatgtcgttaatgggtctgctgccaccgcaggcggcgcgcattgacggcggggaaattctttttgagggccaggacctgctgcggctgaaaaacgcccgtatggccgacctgcgcggcaatcagctggcgatgatttttcaggagccgatgaccgccctgaatcctgtactcaccgtcggcgagcagctctgcgaaccgctgattcgccaccgcggcgagccgccgaaggccgcatggcaacacgctacccagcgcctgacggatgtcgggctggcgcgcgcggagagcctgatggccagctatccgcatcagctttccggcggcatgctgcagcgggtgatgattgccatggcgctgagctgccagccgaagctgctgattgccgatgagccgacaaccgccctggacgtcaccgtgcaggcgcagatcctgcgcctgctgcgcgaccaggcgcgggccaaccggatggcgatgatgctgattacccacgatctcggggttatcgcgcagatggccgagcacgttgtggtgatgtacgccgggcgtatcgtcgagcagggcgcgaccgccgcgattctgcgtcacccgcagcatccctatactcaggggctgattgcctcgcggccggtgccgggggcgcggcgccgacgcctctattcaatccccggccaggtgccggacctcgccgcccttcccgccggatgcgcctttgccgagcgctgcgcaaaagccaccgcgcgctgccgacagagcattccgccgctgtcagggcaagaccggcaggccgcctgcttttactgtgaactttcggagtccgtgacatgagtcatgaatacgtgattgaagtggatgggctgaaaaaacacttcccgctgcgcgatgggctgttcggtcagcagaccggcgtactgcgggcggtggatggcgtgagctttaagattcgccggggaacgatttttggtctggtgggcgaatccggcagcgggaaaaccaccgttggccgcacgctgctggggctgtatgagaagaccgccggcagcgtcaagtttcgcggtcaggaacttgccgaactgccgccgcgggcaatgcgcgcgctgcggcctaaaatccagctggtgtttcaggacccttacagttcgttaaacccgcgcattcgcatcggcgacgctattggcgaggcgatgctggagcacaagctctgtcgccgggcggagctgtatgataaaacccttgaggtgatgcgcatctgcgggctggcgccgcagcattacaaccgcttcccgcacgaattttccggcggccagcgtcagcgcatcggcattgcccgggcgctgatcttaaacccggattttattattgccgatgagccgatttcggccctcgatgtgtcgattcaggcgcagattattaatctgttttccgatctgcgcgacgatcatggggtgacgtttttgtttatctcccacgatctcggggtggtagaacatctctgcgatgacgtggcggtgatgtatctcgggcagctggtggagaccgccagccgcgatgcgctattcagccggcctttgcatccctacacccgggcgctgctggcggcggtaccgaccctcgatccggacagcgagccggtcgcggtggtgcaaggtgaaattcccgacccgtcccggccgccttccggctgtcgcttttccacccgctgcccgcaggccagcgaccgctgccgtcgcgatattccactattaagggaggtcgccgacggccaccacgtcgcctgtcacgcggtttagcgccggccaggcttcggaccataaaaaaaccgcccacaggggcggttacttgcgcaaaagcgaaacggctgcggctactcttccagcgcgaaggcaataatatcatcgcccacgtccggcgagtggctggcgcccccggcggagatcaccacgtactctttaccgcttttcggtgatttatagatcagcggcgccgccactgccccaaccggcagacgagcgcgccacagctctttaccggtggcggaatccagcgcgcgcaggtagttatcctgagttcccgcgaagaacaccagtccggaagcggttgacgtcgggccgcccagcgtcggcatgcccagcgggatatgcatgtgcgttttcagccccagcggaccggtatcctccaccgaccccatcggcacctgccacaacagctggcgagtgttgaggtcaatggcgctcatggtgccaaacggcggggtattacagggaacgcccagcgccgactgcaaaatatcgatccgcacgccgccgtatggcccggcaatttgcggccgcacggttcccataaagccgggcacctcgtcggtggagactttatatttcgccatatcctctttgcgcaccagcgacattctcaacggcatccgcatatcgttgacgaacagcgttcctgtgcgctcatcgatagtgataccgccccagttcatgccccccagcaggcttggccactcgatgtacggcttctctgacggcggcgtgtacatgccaagataagtcgacgctttgaagtcgatacggcacatcagctgatcgaacggcgtcacgccccacatcgatttctcggtgagcggctcgacgcccagctgcggcatgccggtggagaacggctgggtggcggagagatgctcgccttccgcgccgtcatgggcgacaggctgctcttccacgcgggtcaccggcttaccggtacgccggtcgagtacgtaaatctgcccggttttggtggtctggatcagaaccggaacctcttcgccccgctcgtttttcatatggaacagtaccggctgcgacggcaggtcatagtcccagatatcatgatgcacggtctggaagacccacttcgtctcgccggtgctggcgtccaccgccaccacggaagatccgtatttctctttggccgcgttgcgatcgccgccccagtagtccggcggaccgttaccggtcggcagataaatcaggttcagctctttgtcaaagcccggcaccgtccagacgttcggcgtttcgagggtatagacgcgaccttttaccgggtcggtaacgttttccggctggccgacgtcccacgcccacaccacgtttccgttacgtacgtcaaacgcgcgtaccaccccggacggctccccgtgcacgatatcgcgcacccagccgccgagcaccgcaatatgtcccataatcaccggcgttgaggtcgggtggtagcgtttgctgttttcggtattgtccataccctgtttcagatcgacgctaccgtggtcgccgaagtcatcgcacagttcgccggttttggcgttcagggcgatcaaacgggcgtcgaccgtggacaccagaatacgctgcgggcactgctgcagcgccgggctggccttctcttctgcgctcagcgaatcatcgctttgtacatcgtaatagccgaccccgcgacaggtgacgtgttcggcggtacttgcgtgcgggtcaaaacgccagcgcgctttcccggtatccgcatccagcgccgtgaccacgttcagcggcgtacaggagtacagcgtgtcgccaatttgcagcggggtattttcatcgacgccaatcccggcgccggttagccggcggccggtgtgatacgtccaggcgactttcaggtttttgacgttttgcggcgtgatctcatcgtacggcgcaaaacgggtgccggaggcatcgcgaccgaaaaacgcccagttatcgctttttgacgccagggtcggcgtgctggcgtcgctcgctttcaccacgccgtgatgaataccgccgtgcgggtagaaggcggagaccagcgtcgccagcagcaggaggaaaatcgccgaggcgctccagttggcgtagcgtctgcgcgcaggccggatcggcagcgtcgccgccagccacagcgccagcatcagcatcagcgcgggaacgaccagccgggggatcaggccccaatagctgagctgcacttcatacagcgcccagcaaagggtcaacaggaaagtcagaatggcaaaaggcaggacatagcggctgcggacaagatagccgacggcgataagcagataagcgagaccggctaacagataccaggcgctgccgccgagagagaggagtttgcccccccagatagtgaaaaagagtccagtgccaaagcttagtaatgcaaaaagtacccggtaaacggtaaagaacaggcccctaccgccaccttgttgttcgtccatatttcatcccatacgacatcagtcgaaaaaaccaaaacatcttatataaacagcgcattatcagacaaataaaagcgcataccgcatatcatgttggttggacgctcccggacagagcgaagaacgtaaggaattatatgtatttgtaaaaataatgtaaaactatcaggcattaaatgtttaaatttttttaatttataaaagtaagttgaacgaatgatgagttataacgaaagccgtaaagcccgcgttgcattcgctgttaagcgcgtttcgatcctggcgaatcagtccgatccgtcttgctatcctcaccccgctgtttaatcatacccggcgcgttcatttgaccgcttacatcgggcgaagccattcgccttcacaccggaaggggaaaaatttcatggctgttcaggagattaaacatgaataaacgaaaatatctcaccgaaatggagataaaaaaaatcatcaacgaggcgtacaagggagcgaacccggagagggatcgttgtttaatctggatgtgcttcattcacggttgccgtgttagcgaaattcgccactggcggctatctgaccttgacctgcataaccactcaatttacgtcaaacggcttaaaaatgggttttccacaacgcatcctctcttttcgagcgagatgacgtttatccgtgaatggctgtcggtgcgtaaaaactatcgcaacagcgacagcgactggctatttctttcgcaaaaaggaacgccgctatcgcgtcagcggatccacgtactgattagccactatagccaaagtgcgggtttaagaattgcggcccatccgcatatgctgcgccacgcctgcggtttttcgctggccgataaaggcatggatacccggctaattcaggattatctcggtcacagaaatattcagcatacggtgctttatactgcgagcaatgctgcaagatttaaaaatatatggtgacgcgacaaccaatatatttcttacttgacataatgtatcagattgtcactaacataataaatcaccaataccctgtcaacccgtaaggtttttcgtaactcgaataatttaaaacattaattatcaatagattagcaactagcgcgcatgttccagcaaaccttaacctcagccgccaccctccgaaacaccagattatttaccatacacccctgaattattggtttttaatatcgcaaaaatagccatccatggcatctatatctaaaaaatcaataaacaaaatagataaaactaaacatgacactttgatacaaaatgtcttctgcagaaataaatctcagcgtcactggatctatttcagcacgacatctggctatcagattaataaaggctcatgagaaatttatttctgtgaagctattacctttctatattgcatataaggactatcttatgaacaagagtcttattgctgttggtctgttagccggtgtcatgtccgcatccgcattcgcggatgatggccgtattgaattttacggctccatcaccgatagcgcctgtaccgtgatcaatcatatgaccaacccgctgacggtcatgatggggaatgtctccagcaaagccttcaacggcgcgggctccacggcctcggcaaccaaatttattattgagctgaaagattgcccgaaatccgctaagtcggccacggtaaaattcgacggcacggcggatagcagcgttggcactattctggcgctcacccagcaaccgggcgtagctaaaggtgttgggatccaattaatggataataaaaacgtcgtcgtcccattatataccgcctcatccgcttacccgctgcagccgggcggaaatagtctcgctttcgtcgctcgctattatgcgacatcaaacaccgtaaacgcagggttcgctaactcaaccagcacatttaccctcaattacaactaacggatatttcgtcggcgtatttcttttgcgctggcgttatttccgcggaccggcagcggccggtccgtcctttttcgtatttgtggagtcaatagctatcatgcataaaggatatagagtatttcccctcctccttctggtgctggcgagcgaattagcggcggcgacagaaagcggcggcgtcactattggcggcacgcgactgatttttgatggcggcaaaaaagaggcctctttaagcgtcagcaattcggataccggcccatatctgatccagtcgtgggtggagccgaacaataacgatccggccaggccgccgtttattattaccccgccgctgttccgcctcgacggcaatcagcaaaacctgctgcggatcgtcaataccggcggccagctcccaaccgatcgcgagtcgctttattggctaaacgtcaaagctattccgacaaataccgccccggaaaacgcgaatacgttgcaaatcgccgtaaggacgcgcctcaagcttatttatcgccccaacacgctgaagggtatcccggaagaggtgacccataagctgcgatggcgccagacgggcagcaggctaacggtatcgaatccgacgccgttttacatgaatttcaacgaggtcacggtgggcaatcatcccattaccgaagccacctttgtcgcaccaatgagctcagccacgtttgctacccccggcaaggtgaccggcctggtgtcatggaaaatcattaacgactttggcggcgtgggtaaaagccacacgcaggttcgctaacccgccgctgccgacggtttgcgctgcggcaattgccgtcagttcaggagcctttcaggatgaacaaaaaaacgttaagcgactcgcctttgaatttagcttaccttatcgccacccaggttgccctcattgtggtgataagcccctatgcttacgcccgtgaacggttcaaccccgcccatctggaagccggcgcaggcggtctggccaccaccgatctctccgccttcgaggtgcgtggcgggcagcagcccggccgctacagggtggatatttatgtcaatgacagcaaggtggatacccgggacgttgagttccgcatgcagcaaaacgcgcagggacagagcgcattacagccctgtctctccctgaacgatttggcctcatggggcgtcatgatccagcgttatccgacgttaggccagcccgatgccagctgcgcaaggctgtcggcgattcctcaggccagcgccgactttcgtttctcgcaccagcagctgctgttaagttttccccaatcctcccttaccaacgccgcgcgcggctgggtcgatcctgcgcggtgggatgacggcattccggcggcgctggttaattacagcgtcagcggcgccaacaaccgggacaaaaaaggcgacgacggcgacggaaacgcgcagtacattaatttacgtcccggtcttaatatcggtccctggcgattgcgtaattacaccacctggaaccgcagccatcagggtggcgaaaacggcacctcaacaaaatgggataccgtttatacctacgcccagcgcgatatacgcacgctgaagagccgactgacgctgggcgatagcaccacgccttccgatattttcgacagtattccgtttcgcggcggccagcttgcgtctgatgacgatatgctgccggagagcctgcgcggctatgcccccgttgtgcgggggattgctcgcacccatgcccaggttacgatccggcaaaacgaatacatcatttatcagacctacgtttcgcccggcagcttcgaaatcaccgatatgtaccccaccggcggttccggggacctgtacgttaccatcaaagagtctgacggcagcgaacaattcctcgtggtgccctacgcctcggtcccggtgctgcagcgcgaaggtcggttaaaatacgccatgaccgccggcgtttaccgcgcctatgacaacggcattgataaagctccgctggccgccggcacggcgatttatggccttcccgccggctacaccgtatacggtggcggccagttcagtaaaagataccaggcgttagctctgggcataggtaaaaacctgggtcccattggcgccctatccaccgatatcacccaggcctggtcgcagcaaaaaaatcgaccacgagaagaaggccaatcctggcgtattcgctacagcaaaaacctggtgcagaccgggactaacttcaccttcgcgggctatcgctatgccaccagcggctactgggatatgcaggacgttctcaatacctggcgcgacggacggcgctacgtgatgccggaacgccgacgcaaccgcgccgagttaaccgtcagccagaacctgtttcagataccaggcaacctcgcgcttagcgccatcgtggaagactattggggtacacacaagcgcatggagtcatatagcgcgagctacaacggttcgtacaaaggcatcagtttcggtctgagctacagctataacattcactcaacggaacgctacggccagcggtccgggcgcacctacgaccgcgatgggctgtttgcgctcaccatgagtattccactggataaattattcgacggccatcccacctacgccagctacatgatgaataccagtaagcagggaaataccaccaataacgtgagcctgggcggtaccctgctggccgataacaatctgagctggagcgtcatgcagggctatggttctcagggccagggaagcaatagcgggattaatgccgactggcgcgcctcttacgccgagaccctcgtcggctacgcccgcgatcgctacagcgaacgcgttaactatggtttgcagggcgggatcgttgcgcatcgcaacggcctcacctttagccagcccctcggcgaaacgatggcgctgattgccgcgcccggcgcgcaaaacgtagcggtgcttggacagataggcgtcaaaaccgatcgcttcggctataccgtcgttccctacctcagcccctatcgcaaaaacgatctcacgctgaataccgaaaccctggccgatgatgccgaactggcgctggcaacgcagacggtcatccccacgcgcggcgcgctggtgaaggccagctatgaaaccagcctcggtaaacgggtcctgatgaccctgagaaaacgcaacggcgcgtcggtaccgttcggcgcaacggttatcgatcccgcctccacgacgccaaaaagcttcatcgtaggtgatggaggacaggtttatctgacagggctaaaagacgcgggtcagctggaggttagctggagtcacgaccctgatggccggtgcagagtgaattacagcctgacgcaaaacgccggcgggattatcaaccttaatgcacagtgtttatagcaggagcatgacgatatgaaacgagtcaacgtcccccttatgctggttattcccatcgcaagcgcagcccacgcggagagcggctattgtcccagctccccgcccacgccgtttacccagcagcttgcgcggatcgcggtatcgcggacgctgccggttggcagcgatattcccggcacgcagcgggtcttcacctttagcggaaattgcaagggtcaaagcggttgggcggatgtcactcgagggcacccgattgtcgcctgctattacggcagcggagaagaagtggcgggttttccgggggtctataaaaccggcgtcgaaggcatcggtattgcgctgcaaaatagcgccggccagagggtgagaggtatcggcagcgactgcgatacgcgcgcgcaggcgctgggatacacctccagcgacgccagcatgaccttcggatatacgatcacattaacgctggtaaaaacgggggatacggtaatgaacgggactctcgatgtcgcgcaaaccaagttcggtatgggtgcatatgataccggtataggtatcggtaatcggggagaccttaactatataagctatgccggagatattgtttataaagcggtaagctgcaccgtcccctcgtcgttaactgtcaacatgggttctgttccggtgggccaattctctggtccaggcagcaccagcgacgaaaaaaacctgtcaattccggtgcggtgcgacgataaggtcgccgtgaatacgtcaataagcagtcaaggttatctctccccgacgctcggcgtagtggccttaagcagtgaaaccggcgtagcccagggggtcggcgttcaggtgctttataacggctcgcccgttcagttcgatcgttttttcccggtcggcaccatccctgaggctggcgcctcgataaccctgccgctcacctttcgctattaccagaacacgccggagattcatcccggccatgccaacgcggtggccaccttaacgatgatgtacaactgagtttatcccgctctcgtttctcactgcttacttaaggagtcgataatgagaattatcgccagcccggccgtcataacgttatttacggcgatttcgtcgtcattacccgcttatgccgcggatgtcactctttatatcaacggcgatattgttgcttcttcctgcaccgtcgaaaataacggtatttataatatcgatctcggacataatattcccagccgccggcttagcgcggccaactcttactccgcctggaaagagttttacgtcacgctgagccactgtcccgtggggacatcaagagttaccgctcactttacaggccctgttgacggagctgaccctgatttatatgccaacgtgagcagccccgatagttcacgcaatgtcgcgatagaacttcagcgtataaccggttcagtaaatgccggcagcggaaaatctattgccgtcgacgtcgataataaccgtcaggccatattcgatatgcgggcgcgcatttttagcgtcgcagggggtgccaccgcgggtaatattagcgcaatggtcgttatgaattttacctataactaaaggttatctggctcttaccgagccagatactccggcttcagagggtaattgagctaaagcgcgccggattgctcgccgtatacaagacggtatgctggatattgcgatggccgagataatcctgaatcaggcgtgtatcaacgccctcttccgcaagcgcataaccgcaggcgtggcgcagcatatgcgggtgtaccggaacggcaatgccggcctgtacgccataatttcgcatcataacgtgaatatgctgtcgggaaagcggagtgccttttcgcgacaggaacagccagggaagatcggcgtttaaacagctcgtgcgcttaaccagccactggcttaacgccagctgttcacggggctgaagagggtgaacagttgaaaagccattttttaaacgccgaatggcgatccgctggctggataaatcaatatcgctcacttttaaaaaacgtaattcacttacgcgcagtccgtgaataaaacacatgaggagcatgcaataatcccgcagcgagccatcctgctgctgcgaagcatcaattaatgcttgcacctcttttttacttaaatattttcgttttttcatagccaacctgacggtttcttcaatggagcccctgagattcggctcctgtattgactctgctcatggctactggcaatccactgtcgagcaatccttgataactgcaagtcctgaacactgttaatagtcataaacgctaccgcccaatagtatcaaatatcaggaatagcccaaatatcacatcggtaaaattaaaaacaaatagatttagctgttatgtaaataaggaaatttataagcttatgctattaatatttatcttaagtctgatgaggcggcaagtttttttaagtctatgtgtagacttattgggggtttattcgccccctcagcgtcatcgataatgttttggctacagtttgctgttttttggaagttctattttttataaggaaatcatcagcatggaaacaatccctcgtgtacaacatgacacagacctgctccggaccatcaccaaacccatagacgacattgataaactcattcgctgcctggcgcctaaatgtaacaaaatgttaatgaatggtagacgaaacatcggcatagtaaaagaaaaccagcatcaatgcttggttttgttccgcggcacgatgtctttatatcgcaacaacgacggactcatcatcaactccgaaacgagtccattcatctttggcatgaatagtcagctacgttattcccggcatatttacctgcgcacccaggaaacatcttctattggcctgatatcaattaacgaggcgcataagatcatcgccgaacagcaattatgggaaaatgtctcacgtctcctggaatattcctcggcaaaagtctacgcccactgttttaaggtttctaaactttcctgttatgagatcattgttcatcagcttatagaattaaacaatgaaccagaagcgatcaaaaataaaatcaccgccgccaattatattctgtcgcgaacctttttgtcgcgcagtggggtcatgagaaccctggccaaattaaaacagctgggcgctattcagctccatcgaggcattctggtgaccatgaatcaactgcctcccagcctgaagcttagcgaataacgtctttagccgagcggccaccgcgatgtgggcgccggccgcattcagcctggttgactccgccattgccggtgggcagccccctgcccaccggcaaatgcgaaacgaggataatcagccgtgacgattcacgctaatatcgcgtagcgcggcggccatatccagctgggccagctctttcaagccttctcgcttgataaactggctccggtgcttgcttttaacctcttccaggcttttctttatctcgttcgccggcaatttataccagccgcgacgatgcttctcaccgccaatttccagccaaagctcagaatagctggtttttactctgtcgctttttacatggtattggctgtcgatcgcatagatctccttgatattgaaatgcgacaaaaaaccgtacagcagcgtgataattaagttcttcggtcggatgccgtaaagctccttggtcagcgctttcacttcttcattatcaatgtctttcccaccctggatgccgccaatccaggctcggccatcttcggtgcaggaaaaacagatactgtagacgcgtttatcacccaggaacattaagagcatcagctccccctcctcctgaaaaggcgatgccagcagcttcacatcaatgcaggtaccgtttttcagcgcaatagtgattagcgaacgaccaaatgctttcatatcgtacagctgcggcaacgcctcgggaagaaaggttttctctataaaattcaaagcgccatgagcaatattgagcttcgctctttttgacatctttttatttaaataggccttaaagggtttatcttcaaagttaaccagcccctcggttgctcccgttagttttgcacaagcgtaattttcacataacgtctgatattccttatattttcctccgattaaagatatttccctgcatttccgcaatacctttttatagttgagtttaacgtgacaaataaatttattagttttccgccattctttgatagcggctactgctgttgtcgagaccattgaccataatccatagatacatccataagccggtcaatattagcatattttatacaagtcaatgtctaacccagcgctcgttgtcgattcgtttaataaataatttgatcgcgactaaaataatcgccggcaggttatgaaacatgctttcaactattattattagtaggatcccgacccgcgctcgctcccgactgtatgcagtagcaaacccgcacttatcgctatgtgctacccgggttcacaccgggtgcatccccccggcgttttgcctatacttgctcacggtcaaaactgaacttaagtgggtaacgcatggaaattgatctcgataacctcgtctttagcgggctggaagaagcgcaagagcgcaacgctgaacgccttgaagaggcagataaaaaagcgcaggccgttgttgccgacgatgactgcggcgacgcctgtaagatctaacgacgaaaccggctaccctgccggttttttttacctgcctctcccccaggggatgcccgcggccagcgacatcaccgtggcaatcagaaagataaagccgatcgcgaaaccggatggaataacgccggaggtaatggaggcaatatactgcccggtgttcagttccgctgaaatatgccccatcaggaaagccaggatcatgattaaactaattttaactatgctggcttagccgatataaagttctttgaaaagttctcaacattcagaataccgcgcgcggaaccagataaaagagatttgcgtccttcaatcactattaaaatgtatatcagacaaggaagaaaattttgcctattttcactctattcagggaaaaaacgagaaaactgttctctacacgccaaaatcaataatcattaagcaattgatataaaataactttattttaaagggtgatgttaatcacaaaaggtagaggaaaaatcttctcctgcacgcttccgctggatctttttttcgtcctgccgctcacagcctgagccaccgctgcgaagaatgagttagagctattttctttagaatgctgtatggtcatacgctcttaaatcaggaaatatcatatgtcagaacgcaaagacgctaaaactcgccgtaattatctcgttaaatgctcctgccctaactgctcccaggattcagaacacagcttcagccgagtccaaaaaggtgcacaactcatttgtccctactgccataaactctttcagtcctcatcacgacccgctgcataattttctcttgccagatgccgattgccgcgcgtggctgagcaataatcagccagcgccgatctcttttggcgaaaaaaagcccgccagcgcgggttttattttgatttgaatagacttcccgcgcgcttactgtatagtcgtggcggttttcatatttaaaaggtatttcgttgttccaaaaaatgacaggtattgtcaaagcatttgataataaaacaggcaaaggcctgataatcccctcagatggtcgcaaagacgttcaggttcatatttccgcattatcgcccggcgaacccaccacaatcagcccgggaatccgcgttgaatttcgtcgcgttaacggactgcgagggccaaccgccgccaatgtctatctttcgtaaataccggctccaggcgctaccgagcggattaaaacatggccagaaaacgcttcaccgtgcgcgagcgctcgtagcgtcgccaggcgatagcaatatcggtttttagcggcgtgcccgacaaagggtgatagctgacgttaggtagcgtgatgcaggtcatggactgcggcaccagcgcaaagccgaatccggcctccaccatgcttaacgacgatgatatttgcgatgactgatacgttcgttgcatatcaataccggcgcgcagatagctgttatacaccagctcatacagccccggagccacttcccgcgggaaaagaatcggcgccacgtccgttaactgctccagcgtcagctcgctgtgggacgacagcggatgcgaacgcgccagcgcaatcaccatcggctcctggtcgataattcgcaggttgaacgctttactgctttcacagggcaggcgcacaaaagcgatatccagctccgcttcgccaagcgcccccatcagcgtcgccatattgccctcgacctgatgtaacgtgactcccgggtgactgtgctgaaactgctggagcaggctaaagatttgcggatgaaaggcatcagaactggtaatgcccagcgagagtcggccgttcaacccgcgggcgatccccttggtcttttccagcgccgcgtcgcttaatgccaggatctggcaggcatcctcatagaaagactcccccgcttccgtcagctcgacgccgcgggttaaacggcggaaaagcggcgtgccaatttcccgttcaagtctctgtatttgctggcttaatggcggctgggagatgccaagttcttttgccgctttagtgaagtgtcgcgcctcagcgacggcgacgaagtagcgcagataacgaagttccatatcgaaaacgtctcaaacaatcatagattctatattggaactgtgagctgaatcgcgtcaacatttatttaacctttctgatattcgttgaacgaggaagcgggtaatgaaccattctgctgaatgctcttgcgaagagagcctgtgtgaaactctacgaggattttccgcgcaacatcccgatagcgtcatctaccagacttctctgatgagcgcgctgttgagcggcgtttatgagggcaataccaccatcgccgatttgctcacccacggcgatttcggcctgggcacctttaatgaactggacggcgagctgatcgcgtttagcagcgaggtttaccagctgcgcgccgacggcagcgcccgcaaagcccgaatggaacagcgcacgcccttcgcggtgatgacctggtttcagccgcagtaccgcaaaacgtttgataaaccggtcagccgcgaacagctgcacgacattatcgaccggcaaatcccctccgataatctgttctgcgccctgcgtatcaacggccattttcgccacgcccatacccgcaccgtaccgcgccagacgccgccctaccgggcgatgaccgacgtgctcgacgaccagcccgttttccgcttcaaccagcgcgaaggggtgctggtggggtttcgcacgccgcagcatatgcagggcattaacgttgccggctaccacgaacacttcatcaccgatgaccgccagggcggcggccatctgctcgattatcagctcgaccacggcgtgctgacctttggtgagatccacaaattgatgattgaccttcctgccgatagcgccttcctgcaggcggatctgcatcctgacaatcttgatgccgccattcgctcagtcgaaaactaaggagattctcgtggataatcaacatcaaccgcgccagtgggcacacggcgccgaccttatcgtcagccagcttgaggcgcagggcgtacaacaggtgttcggcattccaggggccaaaatcgataaagtcttcgattcgctgctggactcctccattcgcattattccggtacgccacgaagccaacgccgcgtttatggccgccgcggttggccgcatcaccgggaaagcgggcgtcgcgctggtcacgtccggccccggctgctctaacctgattaccggcatggccaccgcaaacagcgaaggcgacccggtggtggcgctgggcggtgcggtaaaacgcgccgacaaggccaaacaggtgcaccagagtatggatacggtggcgatgtttagtccggtaaccaaatactcggtggaagtcaccgccgcggaagcgctggcggaagtggtttccaacgcgtttcgcgcagccgagcagggacgccccggcagcgccttcgtcagcctgccgcaggacgtggtcgacgggccggtccacgccagggttctgcccgccagcgatgcgccgcagaccggcgcggcgccggacgaagccattgagcgagtcgcgaagatgattgccagcgctaaaaatccgatattcctgctcggcctgatggccagccaggcggaaaacagcgcggcgctgcgtgaattgctgaaaaaaagccatatcccggttaccagcacctatcaggccgccggcgcggtgaatcaggaccactttacccgcttcgccgggcgggttgggctgttcaataaccaggcgggggatcgactcctgcatctcgccgacctggtcatctgcatcggctatagcccggtggagtacgaaccggccatgtggaataacggcaacgccacgctggtgcatatcgacgtactgccggcttacgaagagcgcaactataccccggacatcgagctggtcggcaatattgccgccaccctgaacaaactctctcagcgtatcgaccaccagctggtgctgtcgccgcaggccgccgagatcctggttgaccgccagcatcagcgggagctgctcgaccgccgcggcgcgcagctgaaccagtttgcccttcatccgctgcgcatcgttcgcgccatgcaggacatcgtcaacagcgacgtgacgctgaccgtcgatatggggagctttcatatttggatcgcccgctatctctacagcttccgcgcccgtcaggtcatgatttccaacggccagcagaccatgggggtggcgctgccgtgggcgattggcgcctggctggtcaatccgcagcgcaaagtggtttcggtttccggcgacggcggcttcctgcaatccagtatggagctggagaccgccgtacggctaaaagctaacgtcctgcatatcatctgggtcgataacggctacaacatggtggcgattcaggaagagaaaaaataccagcggctctccggcgttgagttcggtccggtggactttaaagcctacgccgaagccttcggcgccaaagggtttgcggttgagagcgctgccgcccttgagccgacgctgcgggcggcgatggacgtcgacggccccgccgtggtcgccatccccgttgattacagcgacaacccgctgctgatgggccagcttcatctcagtcaaatactttgagtcactacagaaggaatccagcaatgaaaaaagtcgcactcgtgaccggcgcgggccagggcatcgggaaagctatcgcccttcgcctggttaaagatggttttgccgtggctatcgccgattacaatgacgccaccgcacaggcggtcgccgatgaaattaaccgcggcggcggtcaggcgctggcggtgaaggtggatgtctctaaacgcgaccaggtttttgccgccgtagaacaggcgcggaagggcctgggcggttttgacgtgattgtgaacaacgccggggtggcgccctccacgcctatcgaagagattcgcgaggacgtgatcgataaagtctacaatatcaacgtcaaaggcgttatctggggtatccaggccgcggtagaggcgtttaaaaaagagggccacggcggcaaaatcatcaacgcctgctcccaggcgggccacgtgggtaacccggaactggcggtctatagctcaagtaagtttgccgtgcgcggcctgacgcaaaccgccgcccgcgatctggcgcatctgggaattaccgttaacggctactgcccggggatcgttaaaaccccaatgtgggtggaaatcgaccgtcaggtttccgaagcggcgggtaaaccgctgggctacgggacccaggagttcgccaaacgcattacccttggacggctttcagagccggaagacgtcgcggcctgcgtctcttatctcgccggtccggactccagctatatgaccggccaatcgctgctgatcgatggcggcatggtatttagctaataataaataagctctgacatggtttgccccggcttcagcgccggggcttttttatctcaccctttagggaagatccacaggtcgctgacgggcaaggccagatggcagcgcttggcatcgcgcagcgcgctgccgtaggcgcgaatggcgaaatcatcgccctcggtgcgaaacaggtactcccagcggtcgccgagatacatactggtcagcagcggcagtgccagcatattctcctcaggcgctgaggcgatgcgcaggcgttcaacgcggatcaccgccgtcgcctcttcccccaccttgaccccctccccgaccatcccccacagcgcccagctggcgccctcaattcgcgcccgaccattatccagagcggtgacggtgccatgcagccggttattgctgcccataaactcggcggcaaatagcgttctcgggctaccgtacatctcctgcggcgttccctgctgctcgatcaccccgttattgagcagcagaatgcgatcggaaatcgccatcgcctcgttctgatcgtgcgtgaccatcagcgccgacagccccagcttgacgatcagctcgcgcaaaaagacccgcgcctcttcccgcagcttggcgtcaaggttcgacagcggctcatccagcagaatcaccggcgggttgtaaaccagcgcccggccgatggccacgcgctgctgctgccctccggagagctggtgcggatggcgattgccaagatgccccagacccagctgttcaagcacggtctgcacccgctgcttgatctccgcggcggcaaccttacgcagcttcagcggatacgccacgttttcaaacaccgttttatgcggccacagcgcgtaggactgaaataccagccccaggttgcgcgcctccgccgggatttcgctacgcgggttgccgtcatagacgcgggttttaccaatagtgataatgccgctggtcggcttctccagcccggctaccgcccgcagcagcgtggtttttccgctgcccgatggcccgagcagcgagaccacctcaccccgcttcagttccattgacacgcccttgagcaccgggttatcaccgtaggtcagatgcaggttttctaccgataattcaatcatgtaatttcactccaaagcgcagggcgatacccaggcccacgaccaccagcagaatattaataaaggagagcgcggcaacgatatcgatagcccccgccgcccacagcgacaccagcatcgaaccgatggtttcggtgcccggagagagcagataaaccccggtggaatattcgcgctcgaagataagaaacatcagcagccaggagccgattaagccgtagcgcgacagcggaaccgtgacgtggcgggtgatctgcccgcgcgatgcgccggtactgcgtgcggcctcctccagctccggcgctacctgtagcagcgtcgaggagatgagccgcagcccgtaagccatccatacgacggtataggccagccagacgctaaaaatggtgtttcgcagcgcgcgcagctgaacgatcagatgttcacgcagccagtctgccaccggcagcgccgagagccagccgtttttcagcgactgatcgagccacatcggcagaaacagaaatacccacagaaacgccagcccggccagcagcccgggcaccgcacgcggcaccagcacgctatagtccagaaagcgcgtgacgttatccggtttgcggtgcatcgcgatgcccacgaacagatagcagaccaccgccagcgcgccgccaatcaccccaatcgccatagagttaacgatggcgcgcagcagattcggctgctgccagatgttacggaacgtcgccagcgagagttcatcccacagcgaaacgcccacgccccagtttgaaataaaggcccgcagcgccacgccgatcagcggcaccccaatggtgaccgtcagccatgccaccaccacaaccccggcgacccagcgccacttccccagcggcagcgcgcgggcctgggacgcttttcccttcatggtgacaaagcggttggcggtgcgcatcaggcggcgctggagcatcaccagcggaacggtgatgcagatcaggaccaccgccaccgccgccatcaggtgataagaaggcgtgccgagcttgttggtgagcttataaagataggtcgccagcaccatgttgccttccggatcgcccagcaccagcatcaggccaaatacctccaggccgaggaaaaacagcagtacgcaggcgtagagtatcgacggtcgcaccatcggcaggctcaccgaggtcatcacctgcagcggcgatgcgcccaccgtccgcgcggcctcctcgacatccgatccgacgctgcgcagcgcggaagagatatagagataggcatgcggaacgtgcgtcagcccggcaattaccacgatgctgaacatcgagtaaatattccacggcacgaagccgatcagctgctcggcccactgcgaaaagaagcccaccggcccggccgccaccacgtaaccaaagcccagtaccatcggcgaaacgaaaatcggtaccagaatcagcggctcgataaaccgccgcccgggcaaatcggtacgtaccattaaaaaggcgaggatcccgccgagggggatggcaatcgccaccagaccaaacgccagaataaagccggacttgagcgccagataaaaatccgggtcgctaaagatgaaagcgaaggcttcgaggctgaacgatttcgtgcgggcaaaaaaaggcgccgagagaaagctctgcaccacgataaataacagcgggacataaatcgccagcgccgtcatcacgacgacgataccgcgcggcaaaccctgccattttcgacgtaagacattcataagcgatccctttaaacctggcgggcgttaagcgggctgcgcatcctgaaatgatgcgcagcgccggagggttatttcgccgcggcggtacgccactgtttgataaattccagtcgttgtttcggctcaagatacgccagcagcgtttcatcgaccggaataggcttcagcgcgctgccaagcattttggtcataccgtcgatatcatttttaccttcgatatcattgcgcagggagggaatatcggcctggttcgccaggatgctttgtcccttttccgacagcacgtaatcaaaccacagcttcgcggcattaaggtgctcggcttctgcggtaataaaagagacccgcgagagcaccagtacataatctttcggataggagatgccgagcgaaggatcgtttttggcccgcgcctccgcgtaggatccgagaatattgtagccaatcaggttttccccggaggagacgcgctccatcatcgtaccggtggacgattgcacggtcaggccgcctttcgctatgcccgccagatcgtcaaagtagctggcatcggctttgctgtcctgtaccgccagcataaaacccagacctgatttttcaatgtcataagtcgtgaccttacctttgaatttatcggcctggccggcgatcagcttcgccaacgcggtatgcgagtccggtacttcaccctgagggatcagccgcttattgtagataaagaccaccggctcgtaggtcgtgccgtaggctttctgttgccagaccgcccattttggcagcttatcccgctccggcgaggcgtactcttcggcgtaatcggtggcgagcttcagcgccgtatccatggaagagctccagaccacgtcgccgctgccgccgcccgccgcctgttcgctgatatagcggttgtacaattcggtgctgttcatatcgttatattcaactttaatgccgggatattgcgcttcaaagcctttaattaacgggcctgcggccttggtatcggtcgttgaatagataaccactttgccttctttaatcccggcatccaccaccttttgataatccgccggatagccctgaggaactgcggcaaggacctgtccggagatagctgccgtcagtgaaatcactaagccactaattttcatatacataaaatcaacctttaggcatcaattattaaacgtaaatttaacatatagtggggcaccagagccttgcaacgccggggtttgtttttttacggcttttgtgacgctggcgtaatttaaaggaagattcgtggggcgcggctaaagagataaaggttgttgggcgggaatattaagaaaacattaatttttttgttttttaccccctcagtgttgcgttttcttgcacacaaaaataatacccgctggcgccgggcgaacgtcaatcgcgcttatggatattgccatcagggtaaattttgcgatcggccttacaattgagctgttaaataacgtaatggaaaggcatttcatcaaatgaactcgccattctcctgaatttaaaatggaaccaggcctatgtagccagaaagctatctccgctatgtccttgacgtcattgctggctggcgggattaccacttagcatttcatacagcgagggggtgttgtgtccctgtggcattagtcctccttcagcggctgtaatgcaaggtggttatttccggcttccagaacacggggtttatccggatcgagatcttcacgtctgagaacctgcttccaggtattgttgaccatatccggatggcggaacagtccggccaccgcgacaaactgcgcgccttcttccattggcatatcaagattcgcatccccacccggctttatcaccacgtcgcgggtcgccagcaggtcggctttcaggatcgtgtcgccgttcttgaggagttgctgataaaccgttttgtcgaagtttttgcggtctttcaactggtagacacgaaccaccaccggctcagacagtgagttactctcgcgggaatccgtattcagtgcttcacgggctataaaatccagatgcagcaccttaatcttcttataaaacaccgccgtatacaccgctttggtgccatccgtaatactctgcgtcaccccacagcctgccaggctgaacgccagtagtgcagatagccagcacgcgggtttaatcaaatttgtacttagcacgtcgatttccttgttgtggtttcgcaggcgccagcccggtgtagtaacccagttctgtcgtaaaggtcagcgggagatcgtccgcaaacgccccctcctccgctcccagcacgccgttcatgccgagccagaaaggttcttcgccgagcggcgggacggccagcagtcgggtccgggtggtcagggtgatcctggccttaaaacgccagccgagataaacacgcagcatcaccagaaaatcctgatacagcagaccatccggtttccagccctgcgcttcctgttcgttatccgtcctgagcgcaaccagcagttgactgcccgcatccatcgcttcttcccccagcggcgtattgccgtccagcagaaaatcgtcatcgccgtaaaaacccagcggctggccgatctccaccggccgcaggcagtacggactcacctgcaccgtagtatccggggccagcagtctcaccagcgcctgcatcccctcctgggttttgccgggttggcgcagcacaccgagcagcgccagaaagcgggataccggtgtggcgatgtggtttgcggttcccggtatgcccagccccaccagacccagcagcgactgcgaaatgctgtcagttccccctgcctcaaacgtggccggataagagtatttccgccagatgcggtaaaactgcgtcaggatgcggtggctgaagatatccagaaagccctgtagcacctcatgcccttcacggcactgagtgatgtcatcaagataggctgtcggcaggggtgagtcgacaccgtacatccccataaaggttgtgcggatgagcggtggcctgctgtcatcatcctcgtcatattcgacagctttcagttcgctgcccggaaaccccatccccggatgcggcgcaaaccgcaccgggtcatcagcagggtggctggttgaccccatcagcggcctgtccggattacgcttctccagaagctggcagaagcgataaaaattcatgcggtgcaggtcggctgccagccgcgggctcagccgggaatgcggcggttgtgcttctcttcccattccaggcgctctccggtcggttgcagaataataatcaggcggttaaacagatagatgtcggtgtagagcgcgaagaagcggctcagcatctcgccgaacaggcagatgtcgccgcgcccggcaaagccgtggctgtcgagcgtcacctcaatctgcacgccgcgtaccaggtagccctgctcaaatcgcccggtctcactgtgcttcacgtcaataatggcttccaggcgacggcggttcatctcgctgtcggtccattcatacagcgccagggtgccgcgcagcacgtcggcattatccatcatcgacagaaacccgctgccgaggtggctcagcacgcgccagtgaaaacggtcctgtgccgggggatagcagggcagcgtcggcgcacacaggttacgcacggcgacgctggccgaggtgcttttcatcaccgtatccagcacggtgctttgtaatgcgcgtcgcggcagctggccattggtaccggtgagcgtgagggacaggctttcgttttccggcaccgtgtgattatcaaaggcttcgccgccgaggataagccacgtgttatacagtcctgacggaccacggcgcacgcgggtgtggtagtaatactccggcgcttcatggcgcatcatgccgcctttgtggcggaaactggagaacggtacataggtatactggcttgaggatatcaccgaatcgacagcataaatctcggtatggccatcctgcacgcgcatcgggcgcagcatgtattcggtctgcagtgaattcagcgtcagcgggtcagattccagcggaaacaggttaatcaccggcacacagttcaggcgcagatgtttttcggtaaagctgaagtcatgctcccagcgctcggccagcaccacgtcgatttcgaaccacgcgagctcagccggaaagactacggtctccagcccgcgcagagccgtgaacatgaatttttcgcggaaggtgaagtactccagcagcaactggtagccgctaaagctgctgctgtccttcggccacagcccgtcatcatcaccgaatcccagcgcggtgaaatacccgtcgagtgactttctgtccgtgtcacccggcatccgcagccagagacgcgccgtgttcatggtaaaggcttcatgcatggcgcaggccagcggtgcatcagcattgaagtagaacgggatctggctgagatcggcacgactccagtcggcgagatggctgcagttaaagcgcaggttgatgaccgaacgcccgtcagggtcagtcgacagacgggcatgctccagcgacaatggctgaagggagatttctttggtggtggtgtaccggcagcgcgtgcccttctcgccgatcggctgcgaattgacctcgaagcctttgacgatacgcatcttctctttcatctcgcgccagtcgggcgtgaactccaccaccgacatcgacggaatggtgcgcaggtattgcggccacagcaggctgaccagcccttcggtcagttccggcaggtcgtcatcgagtttctcgcgaagacgacccatcaggaaagcaaagccctcaaacaggcgctccacgtacgggtctcgcgcacccgctttatcgagattgagcattgccgcctgctcggggtgagcgcgggcaaattcttcgccggcttccagcagatagcgcatttcagcgtcgtagtaacgcagggttaagtcgtccatatttatttttgctttgtttccgttggattcagagcacagctgcgccctgtagtatcttcagcataaggagaaaacacataacgatggcagatgctgtcgttagccaccataagtacgttgatgccgggaagggataaattttgcgccgcaggggcaactgctggtgctatgtagcgaaccagcatatttccgcccactggcattattgttcggaatatgtcccactattttgtacgtgccggcatgttttccgcaggtcacattctcctgctcccgggctacagggatccccatgacggtatcggtcggatcacctccaagaatttttccaccacaagtggtcatgtcaccctttaccagataataacctttcgccatttttcacatcctgagttcatcaaccattcaaccgcaaagcaccgcactgcctgccgcagtccggccagaagctggtccatctctggctgtaaccacgttttatcggtttcactacgtgcggctttcacgcgcagcagtctgaggaggcgcgatttcacttcaaacagcagtgccggcacccactgcgtgagggttagcgccacgcgaaaagatacggtcgcctgctccggtatttccagccaactctattgcaggtacagacgtttgaggatgcccgctgatcagcccgcggcgtatgccggagagtttattgacctcctcccggatgagctgggaatcatcgtcatatcccggcacctctcccctcggacgggtagcgctgaccggggcaagccagggctgccagctttccgtgcgtgcctgcgcctgctgtcgcagcagattttcattctgcctgacaggcagtaaccagatcctgcagagtgtccatcattcagttccgtccatatcactgtcttccgttttggtcatcagcgcctgagccgtagccgcgctgtcgacgctgaatatctgatccggcaacgtgaagccgcgtaattccagcagcgccagcggaccttttccgagctgtgagcgcagcacccactgcagggtgcggccatccggtgcggtgaaactcatcatccactggctgcggtcaagctgctgacgcttacccaggttaagccagcgaataaagccccaggtcccgctgtaatcaccaaacagacgcgcaccggcattaacggtggtccaggtcagcatggttcccggcttgtaagtgtcgccaggccagcgaatggactgccagtcagccatctggttaaagtagtgcagcttttgcccatcaatggtcaactgcgtttccaccacctgcggcacagggcgcgcctgcagctcaaagctgatgccctgactgccatcggtaaacagaatgtccgacagctggctcagctgattaatggcccgcaggaaggccgggttgaagctcagcccctgactgttgaccttatccggcacccactggctgccctccttgtgcagcacaccgctgagctccgtcgtcaggaagcgctcaatgcgcccgctgtccttgcgcacaaactccgccagcatcggcagggaggcatcacttttgctggcggcaaacgggaaacgaccgtcaaaggcagtttgccagttcgcgacaaccgagcggctccatttatcattcaggctggctgccgacggctgaagcactgtctcccaggcctgagtcagcggctgcacaaacattgtgctgccaaaaccgctccactcctcgccaaggcttgccgaaatcaggctgccgtactgccaggtgtcggtgaggtccacgcttttgccctggaatacggtctgcgccagggtctgcatcatcgcctgcgggtcagaagcgctggccacctgttgcaggcgcagacgcacgcgggtgatacgggtcaggtaagtctgcaggctcagcgtgttatccgccgacatcacgttgctgcctttgtttttgcccagcagctgaagcagcggaccaaaggtttcatccagcggcccctgcgggcctgatgcagactggtcaatcaccggtttgtcttttccgccgaccaggtctttggccgatttgatgatggaatccgaaaggccttcgctttgctggccggtctgtccctgccaggcgagcgtattcatcagggcaatcagcggcgactggcggacgtcactcatcagcgtcagctggtcggtaacgtctgcaatattgttcgccggattaagctgcaggctgttgaggaagctcagccagctgccggcaaagtcagtgaagtaacgctgtgtcagacgcgctttcagggcttccggcgacaggtctgaggagacggcttttcggctgtcgctgagcacccagtcgatttcatcccggcgggaattcgccgccttttcgatggcctgctgaatccccccatcccaggcctggcgggtaaacattcccggcaccacctcctcggtggtaaacagtcgccgcgcatcggtaccgccagtcatgtcctccagagacacatcggcaaagttacgacgcacggatttgagcatgttctcatacagcgtgctttccgcgttgcgccgtcctatctgctgcagcaggacctggcggctctggctgatcagctgcgcatccggcgtgattacccactttggctgcgcaggcagttcggaaatgtaaaaagcccacaaatccggcgccaggctctgccacagaccggctgagatacctgtccgcgtcggctgcacggttttcatggtctgtgcgtagaatgcgccgtcggctttatccggccgggccatcatcagccaggccttcagctggtcgtagcccggtttcgccagctgcgcccgctggtcgctgttgggggcagaatttgccagcgcgctgagcttctgcttaagcgcctcatttgccgggtcgcgtatcaggcggttgttcgccacgccgtaccagggcagcaacgcgtcaagcagctgctgattatggtccagtccgaagcgctggtaccagggggcgccctcctgagcattatgctgcagacgcccggcatcattacgcagagtatgcagggccgtcagctggttgtccgatacggaaggatgcgccaccagggcatgagcctgttcggcgacggagactatctgctgacggttgaccgtaaacgacagcagcattcccgccccccagacaacgatgatggtcatcagtgtccaggcaagcgtcctctcccacgccatgccgacacggcggccccgcacacgggtgcagtcgtcaacgataccctgccaggtcgccggcagggtcagggcatggcgctgtaattcagggatatattgctcagcatcggctgttcccgctgacgtactggcggatttattctccggcaggctgaacatcaggccacgcagcggaatacgctgctgagagtcgtagagccatggcagcagttgctgagcccggcggacgataccgccgtcctggaggtgctggcccagacgcagcaggaagtcgtggctgttgttctcagcgacctggcttaccccctgcgcccgcagggccgggagcatccgctccagctggcggataatatcgtcttcttttgcgcgtaggggaaaacttgcccccacagcctgctcaggacgcataccctgcgaccagttgctgtcgcacagctgccacagccagaccggggcggaataacgcagcagttcgctgattttttccagcccgcgtaaatcgctgtcgctgatttgcggggccaggttaagtgactgcggcatgacgcggacaatcccgtccagcgggcgtccgcggcgcagcttgcgtaatgcggtgtatttttcacggtcaggctccggtgccaggctgccaccgtaaatcagcacggtgcggttgccttcgagccactgctgctgttgcaggccgggaaccagctgttcgatagcagcttcatcgccggtgatcagcagcagacggactttgcgacgccagaaaagatggtagcgacgacgaaggtggttgagaatttgttgacgggtcgtcactgcagcagatactggtgttacatctttctttggtggcgtcttaacatcatcaccctgcgcattttgccgctctttactgaagctacgtttaccttcagctcgcgcaccaaagaaaagaaatactccagttatggccagtgcaatacttgctgccacagaaccgctcaaccaggcataccaggcggaggtttccctgatgagctgtagcctttcaggcagccagtagacgatactcaccacggcaaggctgcaaaccagcacaattaacaccaaaagccagaacacaatttccggttttttaaatagcgagaggaatcgcctcatgcttcgccctccttagcggaagacgcaggggatacaaccatattccagacctttccagtttgttgatcgcggctaatcagtaagtgatgtgccggttgttgttgtattgattgtgtggcacctgccacggcaagccagagtgatgcgttaccaggatcacccagaaaatcattgaaattatgaaaacccatctgcgggtcgacatttttcagacctgtagtactaatgcctttcatcaaagcggcatgcgcttcggtttcagcatcaaccccactaagccaaagatgctccggcttttcgacgccaaccggcacccaatcgagcgcctgagtaatggcatagtgcaatgcgtcaggctctccttctccggcttccgggcggtgaagaaaggccaacggcggaaggatgtcctgcgtcagtcggttccccagcagtattccgcttatagcttcagcggacattgaggtattgagcggtgcgtattgccacgacaccaccagaaggacagcctcgctgcggatatgatggtcgagccagtgatcaatcgcctgcgcaccgctcccggcaagggtagaaacagattgctgaatacctgactgccgcaatgcgtccccaaaaagggcgaaggcttcctcctcagatatagacgaggagtgctccagaagcatcattacgggcttgtctgctggcaggaaagacagcggctgcgccagtttgcggattagtgccctgaataacgcctgaagatgctgctcttctttggctcccccggtacgggctatctgactcagacgggtatcttcctccccgcgccaggattgctggggataaaagacattctcatttttcacgagattgctgccaatggccgtgaacggtttattcgcagaggagtgtgccgtgcagcattcggccgccagaatttgcagcgcacgtctgccccggcgaacttctttgaggatcgtctgttcccgctccctgtcccgggcattggcggaaattgcacgcagcagataaatcacgaacaaaataaacagcaacccaccaagcataatcgcgggagcgcccacggtcagcaacacgttatttttgcccgtcaccagacgggaaatgacgatacaaaatccaatcaggatcatcagcatcatcatccagagagcaaatttgggggatgcaggcctggcgctgacatcaggcatattttttagatcgacaggcatagtacgattcttgttttgaaataacggcaatggatagcaggctggctgcattctatgagcaaactcaccagatgcctgccagggggttattttacagagtcagttaatattttttggtgtgaaacggatggttgtttgccatcaggagcggtggtggattcccactcccactcttccggccatttatctgcttttcgtggacgccagctgtcgggtctgcctttatttttgggctctgcgggtactggctcgcctttcatatacagacagaggaaactccagacttgctgtaactctgcgggttctccgtctgcaagctgaaaacgatggatgacattatacgttcccggttcgcagaccgagccccatagctgatggcccgaacggtagcgatcgctgcaataccggatttcaccgtgaacatcagcccagttatatcgggtgataatgaccggccatttcatccaggggataggatcaatgcgcttatatttataaacaaaaatcctttgcctcattttatttaaacgaacaggttgttctcgaggcataataaaataaatcttaatacaacttagaaacatacttaaaaaaaagacaaaccccgccagagcgataaaatatggaataaagtccctaccatcactctgtatttgtgttgatatcgtatcgattaatatataaaaaatgatacccaacactccgccccctaatggaatcattccccaccaagtcatccctttgtcataacgggggatttcaagatacacatcatttatcttattcatccagataagccgcggaggcaccagttgcggctcacggctttccggcatatccgctttccaggcactgacgggagggttaagtttcggtttagcgcgagcaaacaaattgtcggtcatttccctgtccttgttgactgtccataatatcacttattccggcagcgtttcacggaaccgaataacaggagtgctaccatctggtgcggtggtggattcccgctcccactcttccggccatttatctgcttttcgtggacgccagctgtcgggtctgcctttatttttcggctctgcgggcactggctcgcctttcatatacaggcagaggaaactccagacttgctgtaactctgcgggctctccgtctgcaagctgaaaccgatggatgacattatacgttcccggttcgcagaccgagccccatagctgatggcccgaacggtagcgatcgctgcaataccggatttcaccatgaacatcagcccagttatatcgggtgataatgaccggccatttaaaccaggggatacggtcttttttgtatttatatacgtaaattttacggcgaccgcgatttaagcgaactggctgatctcgtggcgttataaatgcaattttcaaacaaaataaaatcattgttgaaaaaaaagtgatacttagcattatcaatccaggcattgcgtaaccatctatatattcagatatctgcacgcaaactaatataacaaaaaccattattccaaaagtgaataatgctgatggaatcattccccaccatgtcatccctttgtcataacgggggatctcaagatacacatcatttatcttattcatccagagcaactgaggtggtaccagctgtggctcactgttttccggcatatccgctttccaggcactgacgggagggttaagcttcggtttagcgcgagcaaacaaattgtcggtcattttcctgtccttgttgactgtccataatatcacttattccggcagcgtttcacggaaccgaataacaggagtgctgccatctggtgcggtggtggattcccgctcccactcttccggccatttatctgcttttcgtggacgccagctgtcgggcctgcctttatttttgggctctgcgggcactggctcgcctttcatatacagacagaggaaactccagacttgctgtaactctgcgggctctccgtctgcaagctgaaaacgatggatgacattatacgttcccggttcgcagaccgagccccatagctgatggcccgaacggtagcgatcgctgcagtaccggatttcaccatgaacatcagcccagttatatcgggtgataatgaccggccatttaaaccaggggatacggtcttttttgtatttatatacgtaaattttacatcggctatgatttaaacgaactggctgatctcggggagttgtaaaatatattttcatacagaagaatgacaacgtaataaaaacactagtactaagcaatgcaattgcgggcattgtaaaaccctcaacataaggttgcatctttagacaaatcattaacataaaagacattaaacacagcattaatattcctgctggtaacatcccccaccaggtcatccctttgtcataacgggggatctcaagatacacatcatttatcttattcatccagagcaactgaggtggcaccagctgtggctcactgttttccggcatatccgctttccaggcactgacgggagggttaagcttcggtttagcgcgagcaaacaaattgtcggtcattttcctgtccttgttgactgtccataatatcacttattccggcagcgtttcacgggaccaaataacaggagtgcgaccatctggtgcggtggtggattcccgttcccattcttccggccatttatctgcttttcgtggacgccagctgtcgggcctgcctttatttttgggctctgcgggcactggctcgcctttcatatacaggcagaggaaactccagacttgctgtaactctgcgggctctccgtctgcaagctgaaaacgatggatgacattatacgttcctggttcgcagatcgagccccatagctgatggcccgaacggtagcgatcgctgcaataccgaatttcaccgtgaacatcagcccagttatatcgggttataatgaccggccatttaaaccagggaatacgatcttttttatatttaaagacataaatattttgtcgtctgcagttcagacgaattggctgatcgcgaggtgtaacgaatgcaattttcaaacaaaaaaatgccaatgtcgataaaaccacaacgctcaatattgccaagcaaggtattgcgtagccatctacgtattgcagcatcaaagcacacatagttaacataaaccctaaaaacaaaagcactactaatgctaatgggaacatgccccaccaggtcatccctttgtcataacgggggatttcaagatacacatcatttatcttattcatccagataacccgcggaggcaccagttgtggctcacggctttccggcatatccgctttccaggcactgacgggaggattaagcttcggtttagcgcgagcaaacaaattgtcggtcatttccctgtccttgttgactgtccaaaatatcacttattccggcagcgtttcacggaaccgaataacaggagtgcgaccatctggtgcggtagtggattcccgctcccactcttccggccatttgtctgcttttcgtggacgccagctgtcgggcctgcctttatttttgggctctgcgggcactggctcgcctttcatatacaggcagaggaaactccagacttgctgtaactctgcgggctctccgtctgcaagctgaaaacgatggatgacattatacgttcctggttcgcagatcgagccccatagctgatggcccgaacggtagcgatcgctgcaataccggatttcaccgtgaacatcagcccagttatatcgggttataatgacaggccatttaaaccacggaatacgatcttttttacatttaaaaacataaacattttgtctttttttgttgaaacggacgggttggtcccgaggagttacaaaatacaacttcatgcaaaacaaaaagcaatgtaaaaaaaacataaaacttaacaaaacaacaaggagtaatatattcccactgagatgccaggatattttcattatgacaatgctataaagcgagtagatggtaaaaccaagcattaatactgcagaaggaatcattccccaccaggtcatccctttatcgtaacgaggaatttccagccaggtgtcatttattttatttagccagagcaactgcggaggtactaactgtggttgattattctccggcaggtcctccttccaggcactgacgggaggattaagcttcggttttgcacgctcaaaaaaattatcagtcatactccagtcccttattggctgtccatggtggctgaaagttgcaaaatttcttctggatacgttttgtctggccagtaactgactttcagctccatgcccgtgaagcgccgggtatttagtgggtattctccactcagctgcagtattttactggtacccgccgtgactagcgtttcatccagtgcaggcgcagaggtcattttaatggcaggtggaacgactaccgcattcatgctcatgatatgagtcaattcaacagcctgaggcactggtttggccaggcctgcaagctttgtcggggaaccgttacgcgccagcacctcacgcccaccactcccaatggcagctaactcaaccagccagtctgaaccggactggctataatcgggaagggtcgccagaacggacaccatctcggttcccgatatcgtggaattgaacaagaactcagtgatccggtcgcgaaccagctgcgctgaaacaccgctggcaatggtatgtaattctttcatcgcttcctgcaaatcactcaggctggcggcactccaggctttctctttaccgccgcgcttttcaaccacgccaaaacaggtatgggtcaaccagcgctccagcggcgagcgaacattgctgtcagcagcggatgtcaaaatcagtgccactattcctagagcaatgcaccatcctataggtcctaaaattaatgtttcactgaaaagtgcaaaattgccaacaacacctgcatagatacccaaaccacctgctgtcaatgttacatatccggcagctagatattgatttcctgctttagaatcccctaaattcttaacatcatgattcttcataattaatgatataccatcaataaccaccgccacgccaccgatcactccagccactttcagcattgggtgcaccatctctttgctcgcctggaacatcgtataggtctgcccgacgatttctgccccagtcgccatcattaaaagcgttcccgagccaagcgacattacagattgtgagtcaggtagccaggttttcagcgatttcatattctcgtgcatggtatggatctgaaaaccaagcatgactccggctagcaccagtcccaggctgcctgcataaaaactcggcggcagttcagactgaaagcctgcgactctgcgcatatctgcggcgcttaaaggaatttcccctgttgtcagagagtggctgactatctctggtgtcaggtccggcagtcctgccaactgagatggatttttaagcaagttccccgattttatcgccgacgcgctcgtccccgccttgcgtgctgcctgcttaaacatcaacgagtcaaccgttttcaaaggagccgccagtttgacctgaattttacggtccaggattaccgggtcggtgatttcaggccagtgaccagcccgggaagtactgatgatactgtcagcattttcaagacgttgagtcagaactgattgtccgtgggtatttaatggcttacgcacgacattctgataatccctgacggtcatttctccggaataaaccgccaccacaggcccttcacctgctgcacaggccagggccgacattgtccggacaaacccggcttccgctttcgctgaaagcacgttgctcagttgactgaacgccccattcagcgacatcaccaggcttgctgttgtttgcctgaaggcgtcgctgttaaggaaatgccccatctcgtcgctattgagcagcgttttaagattggcgtaagtcatcgtcccgtcatagaccgacgtcggcagatcttttctgccggctagcaaagccctgtaaggtggacttttcgggtcctgcatccatgaaagccagacggttttaccgccatcagtcgctttatcacttttgtccatccctaccatgccaccgtggagattaccggctagcatgcccagaagtgcagcccaactgataacactggtctctggcgcataatcatgctcgatcacggtatgccaaaaaaccgactgataagccgcacttaaatcctgtacgacagatttcagcttccgctggtagccatctaccgttgactgataacccgaggcaaattcagcgcgaattgactcatggtaatagtcctccagtcgctccatcgcatcctgggttttcatggatacccgtttggcacggctgatgggatattttccgggaatcgctcggatggtgggatctgtagctattttttccgctattccggcccgaatttgtataatggcatctgatatcatcttcttatgccgattttcagtcttagcctgatagtcggtcattaccttaacgacatccattctggcactgttcaattcctgaaccatcccgatggcatcatccagcacaatggcatgcaccacaccgtactgctcctgtaactccgcaaccttattacccagcgccgtctgcttcctgatatcccttcgcggataaaaaccatacgcgccaccgggccgcccttcttttccgacaatactcgggaatttttctgtcgcaaactccagcacgttctttgtcagagctgagagcgtggggtcaagcgtcaggctgcgccccgcaccttcaattgtcgctgttttcccgtcagcaatagtcacttgcgtaaaacgcggtgcccgggctccggcttgtttatatttcgccagcacttcccggggccacgggtcattgctgaaggccacggctgcatgggtatgcttcggatcgatattgataaagctgctgcggatatcatgattctgctgcaggcaggcggcactcagaggctccactttccctccttccggcatttcgttcgcattgaacatgcgcaaaaagccctgcggggtgacctggtaggcataccagacctgtttatctgccagaacatacacatagccctcgcgcagtgttcgcagggcgtatttgaactcgccccccttcagccccacatcctggtgaggaacggcaggatgccagccggtattcaccagagaagccgggactgcagccacacgtagcgggtatatcgcaacccccttacgctcacacgacttacagcctgaaggtgtggatgctgcctgctgacttgccgctgcatttttatttacctgtgctctcatatccatttgtttatttcctgcggtcattcagaaagccagcagagcgctgtcagtcagggaagaactttttctacagcggtggttgattcaatttccagtgcttgaggccatttatctgctttacgcgggcaccagaaatcagggcgacctttatttactgcctcatccggcacaggttcacctttcatatacaggcacagatagctccagagctgctgcaactgagcaggagagccactggcaatctggaagcgctccaccacattcagcgttccgggctgacagacggaagcaaacagctgaaaacctccggtatagcggtcgctggaaaaacgcatctcaccgtgaatatctgcccagcggtaagctttgatggtcgtcggccatctggcccagggattccaccattttcttttatagtcaaaggtgtagattttctggcattttctgttcagacgaataggctgatctctaggaataacaaaatataatttatagaataatataatcgatgttattaacataatattataggatgccaaaataaccagcaaagtataatcaaaatcatcaagcagcattgaaagggattcagtaaatataaatataaatataaatataaatataaatataaacatcataaacaacgcccctccccacatcacaccttcataacgaggaatttccatccagatagtattttttgtatttaaccaaatcagctggggaggcaccagctgaggctggttgttctccggcatatcctcctgccagcgatatatgggaggattaagccttggctgagtttcactctggccctgaaaaactgtgtcctgagacattatcttgtccttagcactggcgattaaccgtcttatcagatagttcgctacaggcgcggggaggtgaaagttcactgtccggcgcagtggtggattcacattccatttctgcaggccatttatccgctttacgcggacaccagaaatcagggcggcctttattcaccgcctcatccggcaccgactcaccttgcatatacaggcacagatagctccagagctgctgcagctgagcaggagagccactggcaatctggaagcgttccaccacgttcagcgttcctggctgacagacggaagcaaacagctgaaaacctccggtatagcggtcgctggaaaaacgcatctcgccgtgaatatcagcccagtgataggctttgacagtggctggccatctggcccagggattccaccattttcttttataatcgaaggtgtagatttttcttcttttctggtttaggcgaataggttgatctctcgcagcccagaagtatgattttaaaaaaacaaataaggacgaaatcaatacaaagaacatacctgaacagttaattactgcgaacatatccggaaaatcgccaagaatagagtaaaaaaaaggggttacaaaaatgatgaaaagaaacacaataaatgcgcctcccaacatcccccaccatatgacaccttcataacgaggaatttccatccagatagtatttttagtatttaaccaaatcagctggggaggcaccagctgaggctggttattctccggcatatcctcctgccagcgatatataggaggattaagctttggctgagtttcactctgaccctgaaaaactgcgtcctgagacattatcttgtccttagcactggcgattaactcgtcttgtcagatagttcgctacaggcgcggagagcagaaagttccctgtccggcgcagtagtggattcacgttccatttctgcaggccatttatccgctttacgcgggcaccagaaatcagggcggcctttattcaccgcctcatccggcacgggctcgtctttcatatacaggcacagatagctccagagctgctgcagcagagcaggagtgccactggcaatctggaagcgttccaccacgttcagcgttcctggctggcagaaagatgcaaacagctgaaaacctcctgtataacggtcgctggaaaaacgcatctcaccgtgaatatctgcccagtgataggatttgacagtggctggccatctggcccagggattccaccattttcttttataatcgaaggtatagattttttggcgcttactattcaaacgaataggttgatctctcgcagcaaaaaaataacatttaaaaaacatcaccgtaagagatataagtataaaatcaccaataatggatgtggtaataatatttatatcctgttcaagcccaagcatagacagagtcaacaaaaaataaaacaataaaaccaacaaagacaatatagcgccaaatagcatccctccccagacaaccccttcataacgaggaatttccatccagatactatttttaatatttaaccaaatcagctggggaggcaccagctgaggctggtttttgtccggcatatcctcctgccagcggtatatgggagggttaagccttggccgagcctcgctctggccctgaaaaattgcgtcctgagacattatcttgtccttagcactggcgattaactcgtcttatcagatagttcgctacaggcgcggagagcagaaagttcactgtccggcgcagtagtggattcacgttccatttctgcaggccatttatccgctttacgcggacaccagaaatcagggcggcctttattcaccgcctcatccggcacgggctcacctttcatatacaggcacagatagctccagagctgctgcagctgagcaggcgagccgctggcaatctggaagcgttccgtcacgttcagcgttcctggctgacagacggaagcaaacagctgaaaacccccggtatagcggtcgctggaaaaccgcatctcgccgtgaatatcgggccagtgataggctttgacagtggctggccatctggcccagggattccaccattttcttttataattgaaagtataaatcgcctgtcgttgcttgttcagtcgtataggctgatctcggggttcaaaaaaataaatttttaaaaacatggacatcagcgtaatgagaaagaaatcaccaaaagcataaataattaaaattccctccccattaagctcctgctcaattaaccatcctagaaccgtcatgaaaacaataatagccaatgtcataatggcacccaaaatcatccccccccagacaaccccttcgtagcgtggaacttccatccagatactatttttcgtatttaaccaaatcagctgaggaggcaccagctgaggctggtttttgtccggcatatcctcctgccagcgatatatgggagggttaagccttggctgagtttcactctggccctgaaataatgcgtcctgtgacatcattttatccttaattgccttaagtgctggtgattagctgcagattttcttccggcttgagcttatctggccagtaggtcactttaagctccgcatcgctgaatttcatgcggttaaacgcaaactccccctgcagcagtagcccgcttgtttcccagctttctttcattactgaatcagcagacaaggtggccgatcccattcccatcagcgtgatatcaaaactctgcttagccgcggttttcacgttattcaccttccctgaagacgccgactgcgccagtaactggctgcccccgcggcctttgaccgtcagttcgatcagccagtccgagcccatcttactgcaccccggcaacttcacctgcaccgccaccagtcccgtctcggcagtattgagcaccacttcggccattctttcacgccggatttgtgcagaaacgccactggcaatggtgtagtacgctttcatcgcggcctgaagatccgtaagactgttagcatcccagtgtttttcatttttaccacgagcctcttcgatcccaaaacagcagtcactcaaccatacttccagcggtgagcgcacttcatctgcggccatcgttgccagtatggctcctaaaatcgccagcccaatgcaaatgccaattgggccgaacaaagcgaaatctccggcaataccagcatatattccaacaattccacttagcgttgtaaaaaaactagagccaaaataaagatttctagcagctatatcaccatttgcctcagctttattggcattcatccacatcccaatcccatccacgatcgacgccacgcccccaatcaccccggcaacccggatcagcggatgggcgtagatttcagcgccacgcactattatgttgggcttgacgtcccaggggttggtgccccagcgagcgatcatatgaccaaaaccgaccatttccaccgccgatgccgtcaccatcagcgcgctggaggccagcttcatttccgcctgcgcatcccccggcacagcctccttcagcgctttaaggttggcgtccagggcacttttctgcagacccagcatagtggcccccagcaccagacccaggccgctgctgctgaatacccgtcgcggaagctggtactgctgacgagctattttcagcgtatcccccagcgtcatactcatgctacccgttgtaagagaagcgtctacggcatcctgcgcgaggatcagattcgggaatccggaaagatggctaccgtctttcagcatcgtgcctttactcagggccgccgaactggaacccgccttgcgtgctgcctgcttatagaccggtgattcaatatctttcagtaaggatgcatagcgtacgtgaatttttcgctcaagtatgacgggatcagttacctgcagccaggtaccggcatgggaggtcgtgatgcctccccgcatggtcccccaaacgggacgaccgtgcccatccagctgcttaagcatgatattctgaaattcacgaacggtgatttcacccgaaaaaatagtaacagcaggttcaccttctgcagcataggccattgcctgaagtacccgcccgaatcctgcgttcgctttggcggaaatcttctcgccaatcatgctgaatgcgccgttcatcgacatcgtcaggctgcttacgggctggctgaagttgatgctgtccacaaagtcacagacttcctgactgttcagcagggtcttcatattggtgtagtttgctgaaccgttgtagaccgccgcgattagcccagactgtttgccaaggagagacaaaaatggcggactgtccggactttccatccagtcatgccaggccgatttgtccttatccattcctgccatcgccccctgcaaactggcggccagcatgttaagctgagccgcccagctgattacactggttaccggggaatagtcctgtttgatcaccgtcagccataaagccgagtgataccaggcatccagatccttcgccaccgccgttattttttgctgatagccgtccaccacggctttaaattcccgggcaaatttagcgcgactgggttcgctgtaatattcctgcatcctctccagcgcagaacgtttggtggcggcaaccatatcttcacggctgaaggttattccctgatcgaagggggaatcagtaaaaggcgggatagtgacaggcttaatgcttttatccgcatccacctgctttgtcatcagttcctgaattgacaaaatcgtgtcggaaatggtgccctgatgaagattcgcgggtttagaacgatatttcgccagcgcatccaccacatccaggcgggcgtgattaagttcctgaacaatcccgatggcatcatccagcacaatggcatgcactgcaccgtacagctcctgtaactccgcaaccttattacccagcgccgtctgcttcctgatatcccttcggggataaaaaccatacgcgccatcgggctgcccttcttttccgacaatacccggaaatttttctgtcgcaaactccagcacgttctttgtcagagttgagagcgtggggtcaagctccaggctgcgccccgcaccttcaattgtcactgttttcccatcagcaatagtcacttgcgtaaaacgcggtgccgaagcaccggcttgtttatatttcgccagcacttcacggggccacgggtcattgctgaaggccacggctgcatgagtatgcttcggatcgatattgataaagctgctgcggatatcatgattctgctgcaggcaggcggcactcagaggttccactttccctccttccggcatttccttcgcattgaacatgcgcaaaaagccctgcggggtgacctggtaggcataccagacctgtttatcagccagaacatacacataaccctcgcgcagtgtacgcagggcgtatttgaactcgccccccttaagctctatgtcctggtgagggacggcaggatgccagccggtatttaccagagaagccgggactgcagccacacgtaacgggtatatcgcaactcctttacgctcacacgacttacagcctgaaggtgtggatgctgcctgctgaattgccgctgcgtttttatttacctgtgctttcatatccattatcaaattcctttctcagtcgcgtcatgcctgacgcagctcctgccagacaaagtccgggagggtctgaagcagttgggtaaagtgcagtgccgggttttccgcggcttcctgcagtcgggcctgtacgactgcatgtgtagtgatatcaacgggcaaggtcagggcattgagcgccaggcatagccggtcactgagatgatgcagccccgatttatcagcggcaaaccaggcatcagccgcaagacgcacagcctctggaggtaaagcgtcatttgattcatgccaggcagacagcaaacgccagatattacggacttcagcttgtgcgtgttcagctccccagttcagcatccaggcatcaccaccggatttaccactcagtgtcctcagttcacccgtacaggacatccagtgccactgagtcgttgcggcaagcagacctgccagcaactcagggtcagcagtcgcctgcaacagttcaaggcgcaggggttcgaacgcagggatactgacgcccggtttgatgtgtttgcacaaatcagccagccagacagccatttcatcaggcgaaagtgctgaattcagccagccgcagacatagcgcttctcgtacagtgcttctccgaatgcataggtttcactgcttcggaccagatcttcatccagagacccgcccggagaagcaagcaacagcagaatcggacaatgctccggcgaccaggctaaatccggacgcaatatcctgcgcagggcatcgctaccgttgctattcctgagcatgtctgcgtgcagaggatcccagctcgccaccttttttagcggatcaagcaccaggtagcggtattcattctgtctggcattcagggcatcagttaagttagtgagggtatccatcagagcgcactctccacacaactggccgccggtggcagttcaggttgtgtcgggctgaagctctgtgatgccagatggttcaggctggctgatttggcattcacatcaccaggcgtcagaatattgacgccagacgggtcgatgaccacagcggttttaccgcaacataaagtaattttcttgcttgcctgaatcaccacctcatcgtctttactgatgatggtcatgcttttcagggaggtcagcatcattgcatccccttgtgcctgaatatcaaccttacccttattggcatacatcttgatgcccagcgttttggcaaacaggctgatgatctcgcctgccgcaacggtgaattttttgaagacgctaaagtcactgttctcgccggaggtctgaataaagttctgtccgctgctgatttggatgctttgcggtgatacctgagctatcccgtccggggcgctcatcagcaacgcggactgctgcagatccttgagagaggatcccagcaatgttttttgcgcctggatctgcgcgagttcagcctgtgcagtggctacagcatcgctcagtgatttcgctaactgctgcgcctgattgagtgtccccagcgccgcatccatcgccagaacctgtccctgacctttgatttgtgcatctgcggtgatgaaaataccctgctgtgcacgaatagccccccagctgtccgtcctgagttcaaaaccttccccgcgctgttgtttcttgctgtcgaccagatgtccgagattcagctggctcttgccgccgtactccgtcgacaccttgatatgctctttcccgcgctcgtcatcaaggcggattttgttgttcgccggggtgcgcaggacgttacgtttgtagtttcggatagtgacatggtcaccgtgcgccgagtcgtgaagtacgccagaaatgtacggtctgtccgggttaccgtcctcaaaaccaatcgccacctcggtgcccgcgagcagcggcagatgcagaccataagtgtccccggcatacggccgggactgacgaacccacaggctctcgaacccggtctcccagctgtcccggtcaaacagcatgttgacgcggtagcggccgtccttatcgatatgcccgtaggtgtcattttcagtggtactggtgacgcgggccggtacggtgcctgccatcaccggacgactgccgggcgccgggcggaaactaaaatccgggctgtccgggataccgtcaaacctgatgccaaagtcctcatcacgccgcgcatggctgtgcatcgccgtgatgaccacgccctgcgcaaacacgtctgccacttcgtacccgccggtgactttcagcagcatccccggagagagggtcgggcagctggtgacggcccgggtctgcgtctggccattcaggtagcgttcgtgacgaatgcgggcatagaacgccccggactccggtgccggattacggtcatgggagtttcccgccgtcaggtagttatccgcccagtgataggcctctccgtaagtggtggcatctcccctggtcgtatcaacgagggtgttcatgtcttccgtggcctggcggtagttgtaatcgcggatgctgacctgcttctgcaccacgttatgatggctctccatctcccacaccgagtccacaccctgcgaatgctgcccggatggcggcaccgacggcagcgtcaggcctttctcatacccctgctggctgtcgtaaaactccaccacatcgatgttcagccgcgtgtcggtggtaaaacgaaaccagagaccgacctcacccagcaggcgggtgataaagtgcaggtcgttctcaccgtactgcatcacctgttcacggcgcggatactcttttgagagcgagaacagaaaatcctgaccgcgcatgttgtgacgctcgcgcagaattttttccacgatttgtgggaccgacatgtcctgataaatggcgttctggtgcgaacggtcaagcagcgccaggcgtggctcaagcgtcagggcgtagcgggtttcgtcctttgaggtgcccaggcgttcaaaacccgtcaccactccctgaatcacccgcaccggctgctggattttgatgccgtagccctggtcaaccggggcctgcagcgtcagggaagccgctttcatcagcatcatctctttgctgatggtatggtcagcgctggtgaactcaatacggtagcggaagggtttgctcagggcttcatcgccttcaaacgccagtacatcgggctcggcgtcacagcctttcaccgaaagcagatgatggctgtggctgaatcttaacggaggattattgctcatgcgtgcactccttctgtgaggtcaaactccagtccgataccctgagccagttcgatttccggctgcagatccggccgctcgtcagattgcgcatccagtaacgggcgcaggcgctccagttggctctggccaagcgtcagtaagggccacagccaatcacagcgagccaggttaggtttcccgcccagcgccatcagcagatgaacgctgcggatgctctgctctccggcaagcgaggccagcagccagtgccccggcaaaattttcgcatgggtgcgggtctgacagagcgaagccgccccttccatcgcacgggcacagtaagggttcagacatcgcaacaggctggctggattttccatgaatctctctctttgtcagttcctggacacgctaccgcccctcgctgttcaccaaagcgcataaggtcaggcagacagattgtatttttctttgctgagtgcccgcatatcaggctctcagcaaaaaactgtggacaggaaaccccgcccgcatcaggcgattgccctaaataattcgtgttgcaggcaggcggcaagttcgtgaatccccgggagcatagataactatgcaaccggggtgagcggacgtagccaacgcacctgcggcgcgaagtatgacgggcaattacgcggtggcgcgttcgttccagctatcggaatgaatgatgttgccgtctttgtaggtccaggtgattttttcgtaacgcagttctacgcgctcaagatggttgtgcttctctttagaaggatccttgatgtcgtacatttcaggggctcactttcaccaccttcacgttttcgagtttggtgttgaagtactccacttcctggcccgcgtcgttgatcttgtaccacttgaattccgcagacttgagggtctgaccggtggtcaccgccttgtacagatacgggctggacgagtcgatttccttggtgaacaggaacggcgtgtggatacgggtgccggtcagtttgccggtgttgttatcggtcgggatgtacaggttatgctcctgagcgacaacttcgatgctgccctcgcgatcctgaacgtccacagatcctttaatgtccgcaccgccgtcgtctttcagccaaagataaacaggaattgccatggaattactctccattgtgttgtgatgcgccatcatcctgcgatgacgccgggtatttgccgggtatctgacaggcattggcctgcggtaccagactgatttcgacacggcggttgagcgtacggccctccggggtgtcgttggttgcgacaggacggctttcgccatagccctgcaccgcaaaacagctttccggcacgtcgccggtgtcacgcatccagtcacgcaccgcttcggcacgtttctgagaaagcgtctggttcagttgcggattgccggtgttatcggtatgcccggacacgacaatcagccagcccggtctggccttaacgcccaccagtgaattgatcagcattttggtggagcctggcttgaggttgtacttgcccgagtcgaacagcgacatgctgtcgaggcggataattttcgctaccggtttgggtttcggctgtggttcaggcggcagtggcggcggcacatacgagcggatcgcttccagcaccggcatgcgcagacgcccgccctgatacaaacccaggctcagccgggccggtacaccgttacgtgcatggtcgtccagcaatgccgcatcctcgcgcagggccgcaacggcgtcggctttcgggccgtagtcatccatagagatgcggtcgtaacgggtaatatcgaagctcacgcgttgcagctgctggcgattgttccagccactgctgagcagcgcagcgatagtcgccagcgtgaagatcccgagcgcacagcggaaggctttgtcatgcggcgtcaggcctcgcccttccggcagcaatggcaggacaaaatccggcaacggggaaataaccgtactgtccgttcccaccggctgccagccggtcacctgttgcatcgcggtatgatgggacaaccacgccgtccaggccgatgtggccaggcttccggcaaggattggtctcatgccccacaccactgcggcaggggcaatgaccggcacatcggggttctcatccataaaaacagcctggacgtgctgatggaaccagctcatcaggctgttcatcaacacctgctgctgcatcgcaggcgttccgccggcggtgacccatgcagcgacagagcccggaactgaagattcacgccagaccctcaccccttcacccgggagagccatctgccagaacaggtcattcgtcatcgcgctgccgacctgaccattcagaatcagtggcacagaatgacccgtttctttacgcagctggctgatgcgccagcgcagggtcatcagacgactggtcagggcttcgctgtccgggtgttgctgcggacagacacaaaccattaccgacagctgacgcccccagtccgggcgcagccacagtatctggcgggctacctgctccaggtcctgatgatcctccacgcggatccagcatccctgcgggacgatgagtaccggtgattgatgcggccaggccagcggcagatcgccgcagaccagcaccacgggctgacggtaagtggcttccggtaggttatccagttgcagggtgacgtcatgccgcgcgcggcgactggcgacataccagcacgccatgataagccccagaacggtaagcagaacgagtactgacaccagtcgggtgaccgacagaaaacccaggcagaccacggtacttagcaaggcgccccacagcgcaagtccgcgctgttgcgcagggctcatttcaccgctcccggcaacagggtctgcagcatctgatccagccagcgatccagtccccaccagagtgcggcaaccaccaccacgctcaggccaatacgtacgggccatgatgccagccagccgcccatttcccgtccggcgcggctttccaccaggactggatgggtttgtggatagctgaacggcgtgacatattcatcaagtgcattaatgagtttctggcgttcagggtcgttcagagagcggaaattgccgaggaaacccagcatcatgactcgctggaagcaggtcacaacagcgtggtcaggagccggttcacgcagcacatcacgcatccgatcgcacagcgtgtcacccgcgtccatagtgccaaggaagagcccctgcaggggaatgtcataccactgcacgcaggcatcgtcctccacacctcgacctttgaccgcctcatcgagcaacgcacactgtgccgtgagaatatgctgacagctggcttcatcaagttcgctcgctttcagctcacgctggactcgttcgacatcagcaatgcagcgttcccaaagcgtgcgcccttccccgtcctggaatatcggaccgtgacgcaggcagatcacctgcagccaggtatcctgaagcagggcatctatatcaatggacgcggcgccgccgcgtttacgctcactcatgttctcagtaccgcaaagaattcaagttcaggctcgccgagcattcccggaacgtaaaacatacatgtgccgctctggagcatttcggtggtcagggggtgagagacatcaaggctgaagtactggttttccagacgcagtggaatggctgccggtacatgacgcagtggcgcgagaggtacgcccacccgcgatgagttgacgatacttctgacatgatcgggactgccgatcttgcactgacgcgggaactgctcctgcagctgtgccgccgacatccgcgaacgcacggacaggtagtaatccgccccttcacgcagacgcgggtcatgcagacgggcctgccagaagtgcagccgggcatcgtgctcaagttcaatcgccaccacccgcgacggcaggctggcttccagcaggtcacccagtaaatcaaacagcggcgggaaaacgttattcagttgctcatgctgccagaccgggatcgcactcacctggtgctccagcgagaaggtcagcaggctgcccgccagacgggccagctccggatacagacgctccggtgggttttgcggatggcgctgaaactgtccgagcacgggctcagcgctgttcagagcattgagcaaccagaacagggacacatcggccacggcaaaatccgccatccgttcgttgctttccctgcgcatatccatcaggcggctcaggcgggtacgcaactgggtcatcagttgctccagttgggtcatcagccagcggctaccctggatggccaggagcgggggaagaaacgtctcatcaagttgccacgccctctgcgaatcctgctgcaggcgggcgatcggacaggtcaggtaatcgctgttattctgatgggcgaaacgcagcgtcagctccgggcgcatcaccgcaatctggcgggtatcttccccaaaggcgttgcggacatcccgccagcgctgccgatagcgaacaggacgctcagccacctcatcgggtttcaggcagttgccgccgttcgcccgcagcagcggaagggccagtaccaccaccacgtgctgtgattcattctcaagcgccagtaccggtggcaaatcgtcagcgttatccgtatcgattaatgtcccgtcggggaaacggatatgcagatgacgggcctgcaggcggcccagtttcagtgcatccgattcgaatgtggcatcgatcatcccccagggatgagaaagcccgagtcgggcgatacattccgcagaccaggctgaatacgcggcctgctgctggaagtgctggggagagaccataacgcccctgccccataacggttgttccgttttcattggctttctgccttagcttattatttcgcctttggcatctgagaaaccagagacaggttcacgtccatcccttccacctggaagtgcggcaccgcgtacagcttcacccggaagaagcccggattgtcctcgatatcttccaccaccaccttcgcgtcgcgcagcggatgcgaggcctgcagctcgtcgcccgggtcggtcatctccgtcaccagaccgcgcacccaggtgttgagctccagctccagcaggcggcgatccttggtggtgccgatgttttcacgctgaacgagcttcaggtagtgcgcaatgcgcgacagcaggaagatatacggcaggcgcgcgttgatgcggctgttggcggtggcgtcggcggtgtcgtacagcgccggcttctgggcggagttggccgagaagaagcaggcatagtcgcggtttttgtagtacgacagcgggataaagccgaggctggcgaactcaaactcgcgggtttccgggatcatcacctccgacgggatcttcacctggttgcctgtgcccagatcgtagaggtggatcggcagatctttcaccgctccgcccgcctgcgggccacggatctgcacgcaccagccgttattaataaagcttttcaccatattggacgcgaaggagaacgaggcgctggtccacaggtatttctcatggtccgggcctttcacctgctcgacgtagttgaagctgcgcaccggcacggtgtccggtccatacggcaggcggcccagcacgcgcggcatcaccaggccgatatagcgcgcgtcgtcggtgtcgcgaaaggatttccatttgatgtactcggcgcggtcgaagtagttgccgatatccttgatggcggcaacctcttccatggactctttcagaaagaaggccgggccgacggcgccaataaacggcatatgcgccgcggcggagacgccggagatgttgcgcagcagcgccacgtcctgcgggctggcgtcgaactcatacgcggagatcaccgagccaatcggctcgccgcccggggtgtcgtactcggcggtgtaggtgtgccagtagagaccgctctgaatcagctccggcgcgtcttcgaagtcctggcgcagatcgtctttggagacgtccagaatttcggttttgacgttctggcggtagtcggtgctgtccaccagctgcttcaggccgcgccacagggattccaccttctggaactcaggatggtgcatcaccgcgtccagctggcggctgatttgatagtccagctccgcgatatggtggtcaatcagggtcttgtcgagcttctccacggtctttctggactgacggatgcagtccataaacacctgcatcgccgccgtcagtcgttcgcccgccggggcgtcggacagcgcggcatcatccagaaagtcgttaatatcgcccaggcgggacgccggggtcaggttgattttgtcaaacagggaagcgtaaacgctctctttttccagtacagcggtctgcccctgcgcgggggcggtttcagtatttacagacatcagcatattcccggttaatccattaaataacgcacgccgtttatttcggggccagcgcgctcatttcgtcgcgtaattcctgcgtcagcgccgggtctttcaggattttctcaagctcttttctgaaagtggcgttatcaaggaggttggatttgaggtcgcgtaataaattccgcatcgccagcatggcgcggagctgggggatctggcgggccacctgctccggttcgaaatctttcatatcggcgaagcggagctgaatattttcttcggcgctatcaccggccagcgtgttctgtaccgtgaggctgatttccgggctgaattccgaaagtacgctgttgaagttatttttattgacgttgatttttgctctttccgataatggccggtcttctttgccattactgaaatcaccgatggtgaggagtttcagcggcagctcgactttcttctgcgcgcctcctgtgtgcagagccagctttaaattaatgcgtgccttgggcacctcattctggaacgtatcagccatagcagtcccttcccgtgaggaataatgtgttaaagataacggtgtgtgaagacccggatatagtagagcaaagcgtcaaaaaatatcaacctgccggttgcaaagtccattataagactttcctcaggcatcttaaggcaaatgtaaaaatgaaacgcatgagacaaacaaagctggtatgtaataacaactcttttcttacaataaaggcaggatgtatacctgacagaggaatgtgaattaaattcatatctgaataggcagcgttgattgatgcaaatcaatatgtaacgcaaatactggtcgttccggatactgaaacgcgcgcgagcaggggcgtaagaaataaattactttttattcttcacaggacatgaaaaactccagtaccgggcatgaatatggttataattaatggctgacaggattaatataaaacttacaaataatacttgtcagatatccggtatcgatggttaaaccggacacgtatagagtcgcgctgagcgcaaaagaaatagcggcatttcattcagcagatatattaaaacacaacttacaataatgcctctcactcatatcatgccctataaccttccttgcgccctccccgtggacagagagagacaacgtctttctacggtgagccatcccagtcaagtcgccagagagaacattcagcgttaatgatccctcacatcataaccagactgcccggtctcaacgctgcacttttcccctcagcccttctctttaccgccacagattcaaaaccttgatcttctccgtggctcagcgcagcatggaaatgcaaacacactaaaacaagaattcgcaacccaatcacaggagagaatcagtgcaaacaggacatcgcttccaggccacggatctgcatcaatttgttaaaacccttttcacccatatgggaagctccctcaccgaagcatcgcttatcgccgaccacctgattgccgctaacctggccgggcacgattcccacggcgtcggcatgatcccaagctacgtacgctcccacgcgcagggttatctccagctcaatcgccacgccagcgtgatgaaggacgcgggcgcggtggtcacgctggacggcaacggcggcttcggccaggtggtggcccatgaagccatgcagatcggcattaagaaagccagagagcacggtatggccgccgtggcgctgcgcaatgcgcaccatattggccgcatcggctactgggcggaacagtgcgcggccgacggaatgatctctatccatttcgttaacgtcgttggcaacgtgatggtcgccccgttccgtgggaaagacagccgcttcggtactaacccgctgtgcgtggtgttcccgcgcgccggccatccgccgctgctgctggattacgccaccagcgccatcgccttcggtaaaacccgcgtcgcctggcataaaggcgtcccggtaccggcggggtcgctgatcgacgctcacggcgtccccactaccgacccggcggtgatgcagacgtcgccgctgggggcgctgctgacctttgccgaacataaaggctacgcgctggcgacgctgtgcgaaattatcggcggcgcggtatccggtggtaaaacctcgcatcaggagacgctgcagggcagcgtggacgctatcttcaactgcatgaccaccattattctcagcccggaagcgttcgatgcgccggatatgcagcgcgagaccgaagcgtttatcgactggtgtaaacggtcgccgcacgacccggacgcgccgattctggccccgggcgagtgggaagaggctaaccgccagcagcgtctggcgcaggggataccgctggacgccggcagctggcaggcgatttgcgccgccgccgaagaagtcggtttacccgccgacaccctcgcgcagctgcgccagaagctggcctgattttccccgatgacgcccgaacgggcgtcatgtcatcgtcattagtgtcgacatcaccgccgcctcgccctgcctgatcaactattctatacaaattcaataagttaagttttggcacagcgtatgcataacgctcccgtcatttgccggtgcgctggctcatgacgccctgacaaaggcgggccgggcccggcctgtccattgttgtttattctctgttaacaggtctgttactgatgaaaaaaatcacgagcgtttgcccttattgcggggccggttgcaaacttaagctggtcgtcgaaaacaataaaattctccgtgccgaagccgccgatggcgtcaccaaccaaaatcagctgtgcctgaaaggctattacggctgggatttcctcaacgacacccagctactgacgccgcgtctgcagcagccgatgattcgctatcagaaaggcgataagttcaccccggtcagctgggaggaagctatccgctatacggcgaaaaaactgcgtgaaataaaggagaagcacggcccgcgcgccattatgacgaccggttcatcgcgcggtaccgggaatgaaaccaactatgtgatgcagaaattcgcccgcggcgtgctccacaccaacaacgtcgactgctgcgcccgcgtctgccacggcccgtcggtagccgggcttcagctggcgctcggtaacggcgcgatgagcaactcgattagcgatatcgaaaactcgaaatgcctgctggtctttggctataactgcgccgactcccaccctatcgtcgcccgccgggtgattaaagctcgcgaaaacggggcgaaaatcatcgtctgcgacccgcgccgtatcgaaaccgcccgcatcgccgatcgccatctgcagctcaataacggcagcaatatggcgctggtcaacgccttcgcccacgtgctgctggaagaggatctgtataaccacgactacgtcgaccgctttaccgaggggctggacgcctatcgcgaaacggtgaaagactattcccctgaagccgtcgaagggatcgtcggcgtgccggccgctgaaattcgccaggcgatgcgcatgtttgccgccgcgccttccgccaccattatgtggggcatgggagtcacccagttcggccaggcggtggacgtcgtcagagggctggcgagcctggcgctgttaaccggtaacctcggacgcgccaacgtcggcgtggggccggtacgcggacaaaacaacgtccagggtgcctgcgatatgggcgtcctgccgaatatgttccccggctaccaggacgtcaccgacgccagcgttcgcgataagtttgccaaagcatggggcgttaacccggctgtcatggacgaccaggtcggcacccggatcaccgaagtgccgcacaaagcgctggctggcgaaattaaagcctactacatcatgggtgaagatcccctgcaaaccgaagccgatttaggcctggtgcgtaaggggattgaggcgctcgattttgtggtggtgcaggatatctttatgaccaaaaccgccgaaatcgccgatgtgctgctacccgccacctcctggggcgaacacggcggcgtctttacctgcgccgaccgcggcttccagcgcttcgagcaggcgattatcgccaccggtaatgttaagcgcgactgggaaatcatcagcctgctggccagcgaaatgggctacccgatgcattacgataacaaccagcagatctgggacgaaatgcgcgagctttgtccgctgttctatggcgtcacctacgagaaaatgggcgatatgaaccacgtccagtggccgtgcccgacgctggatcaccccggtacgccatggctgtataaagataatctcttcgatacgccaaccggcaaaggccagctgttcgccgccccgtggcgcgcgcctgccgagacgccggatgaagcgtatccgctggtgctctgtaccgtgcgcgaagtcggccactactcgtgtcgttcgatgaccggcaactgcgcggccctgcaatcgcttgccgatgagccgggccgggtgcaaatcaatcgcgccgacgcgcagcgcctcggtatcgccgaccagcagctggtgtgggtcagctcgcggcgcggtaaggtgattacccgcgccgacatcagcgatcgcattaacgaaggcgcggtgtatatgacctatcaatggtgggtcggcgcctgtaatgagctgacgcaggataatctcgacccgatctcgaaaacgccggaaaccaaatactgcgcggtgaaggtggaggctatcgcggatcagcgctgggccgagcagtatgcctggacaagctatagtgagatgaaagcgcgcctgaaagcggcggtgaacgtgtaaaacaacgcagggagatgcgcgcgtctccctccatatccacttttgctcccgggggctgcgctcaacgcgccttgcccgggctacagattcaccgccatctgcggatcggtagcccggacagatgcgcagcatcgcctccgggaaattcagctactctgcgctctgttcccgggggcggcgcgcaacgcgccttgcccgggctacaggttcagtgccgtctgcgggccggtagcccggacagatgcgcagcatcgcctccgggaaattcagctactctgcgctctgttctcgggggcggcgcgcaacgcgccttgcccggtctacaggttcagtgccgtctgcgggccggtagcccggacagatgcgcagcatcgcctccgggatcggtctcttacgccaacagtttctccaccagcgccgtccacagcgccacgccgtgcgggatcagcgcatcgttaaaatcatatccggcgttatgtagcggctttgacgccgtctcgccatcggtaccaatccagaaataggcgcccgggcaggcctccagcatgcaggcaaaatcttccgaggccatagagggattgccgttccagctcaccgccgattcccccagcagcgcggtcgccacctcgcgaaccttttgcgcttcagccgggtggttggtggtgacgggataaccgggataccaggcgattttgccttccacgtctgatacctgcggctgggcggcgacatagctttcaatcagccccctgacccgctcacgcacctggttattcagacagcggaaggttccgcgcagcaccactttatccggcagcacgttgatcgcctccccgccggaaatctgggtaatgcttaccaccgtggattcctgcggcgacaggcggcgcgacggaatggtttgcagcgccataatcagctgcgccgcggcgacaatcgggtccgccccgcgctccggcatcgccgcatgacagctcttgccggtcagggtgatttcaaacgcatcgagagaggccatcatcgctccgctgccgatcgccacctggcccagcggcatacccggccagttgtgcagcgcgtaaatggcatccatcgggaagcgcgaaaacagcccctcttccaccatcttacgcgcgccgcccaggttctcctcagcgggctggaaaacaaagtgaacggtaccgcgaaagcggcgggtttgcgccagatgcgccgctgccgccagcagcatcgcgctatggccgtcgtggccgcaggcgtgcatcacgcccggattacgcgatttatagtcgacgtcgctctgctcggcgatcggtagcgcatccatatcggcccgcaggccaattaccggacccgggccgttctccagcgtcgcgaccacgccggtgcccgccagaccgctatgcacctgaaggccaaatgaagcgagcagttcagcgacccggcgggaggtttcctgttcctgataccccagctcagggcaagcatgaaaatcacgtcgccagcgaatggcctcggcgatcagtgaaggggatacagccatgtcttactcctttcctgcacagcttcagcgctgaacgagtgttttatgcaatacgttggggctacaggtaacccgctagcctattggttatatcctttcgcccgctcgctgacaactgccgccaaaccctgcgccaacgcgcctttgcgcgccatcccgcctgcactgcgtttttttgtagtcatatcaacggtgacataaggcgtgcgattaattattatgcagctatactggcgttttgccgaataattcactctacagacctccttaaccggaaataaaatgttcaacccagagcagaatcgtcttgcccccacgctggcgatgatcatggcggcttcattagtgggatttatcaccggatacacggtgcccttaatcagtctggagctggcgcagcagcagattgataccgtttacgtcggcctgctggccgcgctaccgccagcggggatgatgatctcctccttcctctcgcacgcgctgtgccggcgcttcgagatggggcttctgctctccgtcagcctggtggcgctggcggcggcaaccatcgcctcctgcctgtcgtttgatatggttcatctcctgctgccgcggctggtgaccggcctggcgtcaggggtgattatcgtcattggcgaaagctggatcaccggcggcgcggcgggtaaaaaccgggcaaccctgaccggcatttatgcctccgcctttaccggctgtcagctcgcgggaccgctgctgatctccgccggagaagcgtatcaatcatggactctgctgctcgtcgggctggtgaccctcgcctgtctgctgatgctccgccatttgccctccggcagccgcgaacggctggcggaacgcgccagctggcgcagcctcggcgcctttttgccggtactggcttccggcgtattctgcttcgccttttttgatgccagcatactggcgctgctgccgctttacggtatggataaagggctgagtgaagtgacggcggtactgctggtcaccgtggtattaaccggcgatgccgtattccaggcgccgctgggctggattgccgaccgcttcggtattcgccgcgtgcatctgacctgcgcggtggtcttctgcctcgccctgctggccttaccgttcctgctggcgtcgcatatccagctgattgtcggctgtctgcttctcggcgccgcggcgggggcgctctataccctgtcgctggtccgcgccgggaagaccttctccgggcagaagctgattatgatcaacgccctgctgggattcttttggtccgcggggagcgtcgccgggccggtggtcagcggattgctgataagcgtcgcggggtatgatggtctgctgatgacgctgtttgtcagcggcgcgctgttcctgctgattcagtgcctgggtaaaagcgaaaaagccctgctggcggacgaacgcgagcgcgaagaagagatggatgatattagcgaggcggcgcagtaacgcttaagggcagacacggttcggcagaacgaaagcgccctcatcgcccgcgcagggtcttctccccggcagcgcagtcgcgcgccgggggcgggagccattacagcactttacttaaaaacgcggcggtgcgcgggttagtcggcgcgctaaagatctgcgccggtttcccctcttcctgaataatgccctggtcgataaagataacccggtcggccacttcgcgggcaaagcccatctcgtgggttacgattaccatagtcatcccttcgctggcgaggtttttcatcacctccagcacgtcgcccaccagctcaggatcgagcgccgaagtgggctcatcaaacagcataatcgacggcttcatcgccagcgcgcgcgcgatggccacccgctgctgctgcccgccggagaggctggagggccaggcgtcgcgcttatcgctcagtccgactttcgccagcagctcttccgccagacgcaccgcctccgcgcgcgccgtgccgcgcaggctcatcggggccataatcaggttttccagcaccgttttgtgcgggaacagattaaagcgctgaaagaccatgccgacgctttcccgcatcttattcagatcggtggcgcgatcgtgggcagcgaagccgttcacctcaaccacgccttcgctgacggtttccagcgcgttcatgcagcgcagaaaggtgcttttcccggaaccggaggggccgataatgcacaccacttcctgcggcttaatgtcgcagctgatgccgcgcagaacgtggctgtcgccgaagcgcttgtgtaaattacgaatgtgaatcacttttgccaaacctcttttccagacggttaaccagctgcgccagcaggaaagtaataacccagtaaaccagggagatggtcaggtagggttcccagtaggtggcgtaggcgccggaaacggtgcgcgcggcgtaggccaggtccgccagaccaatagccgacgccagcgaggaatctttaacgatggcgatagcgttgttgcccagcggcggcagaatgcggcgaaacgcctgcggcaggatcacctgacgcatagttttccaccacggcattcccagcgcgcgggaagcttccatctgccccttatcgatcgactggatcccggcgcggaagatctccgacacgtaggccccggcattcagcgtaatcgccacgatacaggagagaaacgcgccgtagtttgagcgcagctcgcgagcgaaatcagcgctcatcatgccgctggtcaccagcagtccgtcgcgcgggttgataaacagcggcaccagcgcgaagtgcaccaccataatttgcacgaacagcggcgtgccgcgaaacgcgctgacgtaaaagcgcaccggaaactgcaccagataacgcagaacgtatttccataccccgtgctcggctttcgccatgcgccccagcccgagggtcagcccccacagggtgccgaggatcacgcagataatggtacatttaatggtcatcagggcaccgtccataaacagcggaccgtactcctcaatgatctcccaacggaatcccgtcatagcccttccctaaaaaatacggctatcgccagagtcgatagccgtgatgaaaataaaaatgcgaattattgcgctggcagcgtcgggacgttctcgtcgaaccaggttttatagattttggcgtaggtgccgtcagcgatgattttctgtaaaccggcgttgatcttcgcctgcagctcgctgttgcctttcgccaccgcgatgccgaaatactggcgctcaaatttggcatccggcaccagcttgaactgcttctccgggtgctgcttgatgtagtatttcaccacgccgacgtcgccgaccgccgcgctcacgccgtcttcaaacagctcctgcagcatcagcggagtattatcaaaacgtttgatcgcggtactgttcttgcccagcacgtcggaaaccacgatatcgccggtgctggagttcaccacgccgactttctcgttttttagcgcctcaagggaggagacctttgaatccgccggcacgacgatggactgctcggccgggaaataaggggcggagaaatccaccatctgcttacgcttatcggtgatggtgatcccggagataataatgtcgcggtcgccggtgttgagggtggcgaagatcccttcccacggcgtattgaccagtttgatatcaaagccttccgctttggcgatcgctttgatgatatcgatatcaaaaccttccagctgtttctggctgttctcgaactcaaacgggcgataggttccgccggatcccaccacgtaagtttgctgagccgcgtgggcggtgccgatcatcgccgccaccaggcagcatgctttcatccacttcttaaccatgacaactccgttttatgcattaattttgcataaaaatacacactgtcatcatggcatgcaaccggaaaccttcccgacggtaaattatctgccgtttagcttcgtttaccgccggatttcccgatggcccgatgcaattcattgatccgcttcatcgatttcaccgttttttgcggcgcggtggaggcgaccgacagcacgatcatctccaggcaaaccagcaccgtcccgtgcagcggcacccgcccattatcgccgccgcgcggcacctcaatgaccacctgcgcctcctggctaaagcgggagtccagcgcctgggtaagtaaaatcgtcgggatccccagacggcgggcctcgcgcagggtcgtcatcccctcccggtgcggcgacttctgccccatcataatcagcacgtcgccgcgctgcaggccgatcagctgctcggcgaggctaaacccggtgcggttcattacgtacgaaggcaggccgatgcggttcagcagcctggcggtatactccgccagaatgcccgaggcgccgatcccaaaaatccccacctggcgcgcgtcggtcagcagcgccaccgcctgggccaccgcggcgcggttgtcggggcgcgcaagcacttcgcaggcccgctgatgcccttccagcacgaaatcgatgctcgaattgacgtcgctggataaggcgctcaccgtggagatcattttttccgacgaggtcgccgacgggccgaaccagcgctccatggtctgcttcagctcccgcagtccggcgaagccgagcgcctggatggcgcgcaccaccgtggcgtccgaggtattggtcgcggcggcgatttccatggccgtgcgctccagcaccgcttcccggttttcgttgatatagctcaccaccgccagcagacgcggcgacagctgatgcgcgcgggcgcgaaaacgttcgccgaacaggtcaacccgccccttctctctttttaccaccgttttcatttcagcccctcgggcaaaggacgaccggcaatgtgcgactgtacctgggcgaccatcagcgacagcgcggcgtaggagttagagataacctcctcgcgcggcagcagaatgtagcgcccggtgcggcaggcgcgcataaagtcgcaccagccgggcatcacgccctccatcgcctgcagctcatcctgcggcctgccgccggtatcggaacgccaggtggcaaatacgaaatcggcatccagcgccggcagctgctcggcgctgacgtcaatacgctggccatcggggatgttgtcaatcagcggcgggaagcggaatccggcatcgcgcagcacgcgtcccagcgcatgataggcgtgatgcacggtaaccttgccgttgttggcctgaatcaccgagactacgatgttttgcgtatccaccatcgcctttagctgggctatctgcgcctgatagcggcgttcgaggattaagagccgcggctgggtgccggtgagctgcgccagcttacggtagatgcgcggccgctgccctgcaggtggtcgatgctgaccgttggcgcaatcttctccagctgctccaccgaaacgtggcggctgggctcggtaataatcaggtccggtttcgcggcggccaccgcttcgagatcgatatccgccgtgccgataaaccgaatcgcgctgttatcgaaatcaacgccggtcagctgtgcgctggcgcgtaaaaagtggctgccgtccggacgcgtcctcccgtggctggccaccggcgggacgccaagctcgatcagcgggatggtgatatccagatcgtgcagcgacacaatgcgctgcgggtgcagcggaacggtcaccgtacgacccaaatcatcggtgaaggtttgcgtatcggcggccgaggcgacgcccgccaacagcaccagcagagaaacgaaccaacgcatagcgatcctttttgatttacagggcgtcacggcgacgccagagcagaacgataaaaaacggacagccgaccagcgcaatcacgatccctgcagggatctgcagcggcgcgaaagccagtcggccaattgtatcggtggctaacaccagcagcgcgccaaccaacgcgctgccgcagagcagcgccacctggccgccgcgcagcagaaaccgcgccatatgcggcgccatcaggccaacgaagccgaggcttccgacgcaggaaacgctggcggaggtcagcagcaccggcgcgaaaaagcgcagcagggttagctgctgcaggcgtacgccgagaccgatggccgtgcggtcgccgagcagcgccgcatcggcggccctggcggtcaaaaaaaggatcagcgccccgggcagcgcccagcagaaggcgacggccaacagcggccaggtcgccgcgtgcaggctgcccgccagccagatcatcgccgtttgaacatcgcgcacgtcggcggtggtcataaaaatgcccaccgccgccgccagcgtccacgacacgccgatgccgatgagaataaagcgcgggcgcgaacagtcgcgggccagcgccagaaccagcagcgccaccagcacgccgccgagcattcccgccagcggccgccagaccaggcccaccgccgggaagaacagcaccagcgccagaacgacaatactggccccctccttcaccccgataagcccgggatccgccagaccgttgcgggtaatgctctgcatcgccgcgccggccagaccgagcatcgccccgcacagcagcgccataaacagccgcggcaggcggatatcaaagaggataaatcgctgctgttcacccacgatgtccgcccccagcagcgcacggaacagggtaccggagggcatcgggaagctgccgcgggtcaggctaaacagcgccagcagcaggatgacgagcagcgcgacagcggcgatttttaccgccgcagggcgcagcagaatgtgccagcggccgcaggtcagcggccgaaagccggcgcgacggacggcgcttttcatttaaaaaacctcgcggcgataaaaataaataccggcgcccccaccagcgcggtcatcgcgccggttgccagctcctggggcgcaaccagggtacgagcggcgatatccgccagcagcagcaccagagcgccaaccggagcggccagcggcagcgccaggcgaatatcttcgctaatcagccggcgcaccgcgtgggggaccaccagcccgacaaagccgatcggcccggccaccgccaccgccgagccgcacaatagcgcaatggcggtcagccccagcaggcgggtctgaacaatctttacccccagccccagcgcgaccttatcgcccagcgccagcacgttaagacgcggcgcgatgaccagcgcgatcgtcactcccgccagcgccgggagcagcgcagcgcgcagcgtttgccagttcagcccggcaagatcgcccgccagccaggtgcgcatcgccagcagcgtttgttcatcgaggatcagaatcgccgcggtgaccgccgaggcaaaggccgacagcgccaccccgcacagggtaatgcgcagcggcgtgacgccgccccgcccggacgacgacagcagcatcacgccgccaaacagcagcgccgcgccgcaggcggcggtgagcggtctggctaacgccacgccgccgaggctgattcccagcgccgatgtcgccactaccgccagcgaagcgccggcgttaaggccgagaatatgcggctcgcccagcgggttgcggatcacggtttgcagcagcagccccgccacgccgagcgccgcgccggtgagcagcgccgccgcgagacgtaccaggcgtaaatcgacaataattcggtggtcaaaattgcgcggatcgtaatggagcagcgcctgcagcaccgtttgcggcgcaatccagcgcgcgccgagtccgagatgcaccagcgagccgcccagcagcaggctcagcagtaccagcgccagccgggggcgggattgtcggcgcggcggcagcagcgcggaggcgctcataacgccttctcctcacgggcgcggaacggcataaaaaagggcttaccggtctgcgggttgagcgacatctgcacgtccacgtcaaagacggttttgatcagctccggcgtacagatttcctgttcattaattaccccggcgatcgcgccttttttaagaaacactagcaggtcggcgtagttcaccgcgaagttcaggtcgtgcaggacggtgaccaccgtgcggccgtgatcgcgggttaaggtttgcagcagttcaaggatgtcgacctgatagcgcagatcgagccaggtggtgggctcatccagcagaatcgtcgccgtttgctgggcgagagccatcgcgatccagcagcgctggcgctggccgccggagaggctatcaaccgccaggtgggcaaactctgcggtaccggtgagccgcagcgcctcttctaccgcccgttcatcggcctcggaccattgtcgcatcagcccctgccaggggtagcgcccgcgcgaaaccagttcaaaaaccgtcagcccttccggggtcagcggcgattgcggcagaatgcccagccgacgggaaacctcccgggtcggcatctggtgaatcacctcgccgtccagacgtacgcagccccccagcggcttgagcatccgggcgatagtcgacagcagcgtcgatttccccgagccgttggcgccggccagtaccgtcattttcccgtgggggatggtcagatgaatattgtcgacaattagcgtctggccatatccggccgacagggaatcaaggacgatcccctgctctgcaggcaacacccgctgtggcataactcgctcccgcgccgcaacggcgtggcgccaggcccgctcgttccgcactcaaacaaaaataaatctcattctcttttgatcatgcggtggatgaatgtagtagtcaataccctatgacggcgccggccgcgcgggtttactaccaaaatctgcacaacataaaacgactttaataatcaattaaaacaataatgtatgaaattttcacccagcccattcctcgctaattgattgattatttgtttcgtcagttttttatcttacataacgtttactactacatgccttcatgattgaatgattctcaattacatatctggcgcgcgttgcggcgtaaaaaacagccaggtttatttttcagggcaatgattttattggctttacctctccgcaaaggcgaggttcgttcacgagacacaaaaatgattccactcaatgtcccttattcggcattaaaagggcgtgcgcttttttcactgatttttttcacctcaccgggattattggcagcggttaatagcgccgataaaacaaagaaaaccgctgacgagaccataacggtcgtggccgacggcactcggcaacgcgctacccagggatatcagccggtcaatacctcgaccgccacgctgactaccatgccgatgctggatattccgcaggtggtcaataccgtcagcgagcaggtgctcgaggatcagcatgcgacgaacctcgacgaagcgctgtataacgtcgccaacgtggtacaaaccaataccctcggcgggacccaggacgccttcacccgccgcggcttcggcgctaaccgcgatggttcaatcatgaccaacggcctgcgcaccgtactgccgcgcagcttcaccgccgccaccgaacgcgtcgaagtgctcaaaggcccggcctcaacgctgtacggtattctcgaccccggcggattaatcaacgtggtgaccaaacgcccggagcgcagcttcggcggctccgtctccgccacctccaccagctttggcggcggtaccggccagtttgacgtcaccggccccatcgacgggactcagctggcgtatcgggtaattggcgaatatcagcatgaagattactggcgtaatttcggcaaagagaagagcagctttattaacccctccctgacctggttcggcgagcgggcgacggtgaacgtctcatattcgcaccgtgactacagtaccccattcgatcgcggcaccatcttcgatctgaacaccggccatgcggtgaacgtcgatcgcaaaacgcgttttgatgaaccgtttaatattaccgacggttattccgatctcgcgcagctgaatgccgaataccgtctcagcgacgcttggaccgcccgcttcgactacagctacagccaggatcattacaacgacgatcaggcccgggtaatggcctacgactcggcgaccggcaacctgacccgccgcgtcgatgccacccacggttccacccagaaaatgcacactacgcgggcggatttacagggcaacgtggtcattggcggtttctacaacgagatcctcaccggcctggcctacgagaattacgatctgctgcgcaccgatatgatccgctgtaagaacgtcaagggtttcaatatctataatccggtctacggcactgttggcaaatgctccagcgtttcggcatccgacagcgaccagcgtattcagcaggagagctacgcgggctacctccaggacgcgctctatcttaccgataagtggattgccgtcgccggggtgcgctatcagtattacacccagtacgccggcaagggccgcccgtttaacgtcaataccgacagcagcgaccagaaatggacgccgaaagcgggcctggtgtataagctgacgccgtccgtctcgctgttcggtaacgtggcgcagtcgtttatgccgcagtcctctatcgccagctatattggcaatctgccgccggaagagtcgacgtcttacgagctgggcgcgaagttcgatctgttcaatggcgtcaccgccaatatcgcgctgtttgatattgataagcgcaacgtcctctacacggaatccgtgggcgatgagacggtggcaaaaaccgccggtaaagtgcgctcccgcggcgtcgaagtggacgtgtccgggtcgctgaccgataacctgagcgttatcgccagctacggctataccgatgcgaaggtcaccgacgatccggattacaaaggcaaaccgctgccgaacgtgccgaaacacaccggttcgctgttcctgagctacgacattcacaatgtctacgacagcaatacgctgacggtggggggcggcggtcgcgcggtgagcaaacgttccggcaccaacggcgcggattattatctgcagggctatgcggtggcggatgtgtttgcggcctataagatgaagctgcaatatccggtgaccctgcaggttaacgtgaagaacctgttcgataagacctattacacctcctccatcggcaccaataacctcggcaaccagatcggcgatccgcgggaagtacagtttacggtgaagatggatttttaagcctcatccctgtcccggatcgcggcgccttatccgggctagcacattgtagcccgggggcggcgcggccctaccgcgccgcccccgggaatccccgccgaacggtcagaatcagcacgccccggataacgccttgccttaccagtcctctccctggccaagaatgcgcaaaatatcctgccgatgcagcagcagcagcggattgtcgcgatggcggggatacgtcagcggcagcgcaaactcggcgataatccgccccggtcgcggcgacatgattaacacccgatcgcacagcagcagcgcctcttcgatgtcgtgggtaaccagcaggctggtatagccctgctgctgccacagggcgatcagctcccgctgcatgctgatgcgggtaagggaatccagcttgcccagcggctcgtcgagcagcagcagacgcggctcattcagcagcgcccgggccagcgccgcacgctgcgccatcccgccggaaagctggcgcggccacgcttcgctaaacgcctgcagccccattcgcgaaatcagcgcgtcggcctttggctcaagcccctttttcccctgcgcctgcggtcccagcagcacgttttgccgcaccgtcagccacggataaagggtcggatcctgaaacaccagtatccgttcgggccccggtccccccatcgccgcctcatcaatctgaatttgcccggcctgctgcggctccagtcccgccagcagccgcagtagagtggatttaccgcagcccgaaggaccgagcagcgcgacgctctctcccggccgcagctgcaggctgatattctccagcaccggcaccgtctgtttgccaaggctaaaagcgtgatgcagatgacttatcgacaccgccgcgccggtcgatgccgcctgagaagtggcgttcgcggttaccattgcatccctccccgctgccagctcagcagccggtcgcggaccataaacagcccgctaatcaggccggagcagagcagcgccatcaccagcagcgccgcgtacatattgggataggccgcccagccctgcgcccactggagataaaaaccgataccggatttcacgccgaccatttcggcgacgatcagcaccgaaaacgatgcgccaagccccataaacaggccgacaaaaacgttcggcaacgcggcggggatcgccacgcgcaggatcaggaaacgctggctggcgcccaaggttcgcgcgacgtcataccacgccttatcgataccgataaccccggaccaggtcagcacggtcaccgggaaccaggtgctgagcgcgatcagaaacacgctggcgccgaagctggaggggaagataaacaggcacagcggcagcagcgcggtggacggcaccggccccagcagacgcaacaccggatgcacccagtagccgatccgctgggaccagccgatcgccagcccgctgataaaaccgcagctggtgcccagcagcaccccgagcccgagcagccccagcgaatgcagaaggctatcaagcaggcgcggccagtcatcgtgcagcacctcaatcagcgcctgcggcggcgcgaaaaacggcaccggcagaaacgccgtcttggccgtcagtccctcccacagcgcaaaaagcagcggcagcagcgccagccactttccggcatgctgcaggcgagtcccccgctgccgccagtagcggtagctcagcgccagcagcaacagtccgccgccaagggtgaactgcgccagcgcccacccttcgctaaacggccagcgccgcccggcatcgggccaggccagggtaaacaggccgcccagcagccatagcgcggcggcaagccagccttccttccacagcggcctgccgcttgccgggcgcgtcagcacccgttcaggcgaaaacgttgacataaatgctctccgcaaactgatggggatcggttcccggtttaatgacctgcacccgctgaagatccacggcgtactgggtcagctctttgacaaacgcctcgcccaccgcatgatggccgtgcccctggccgtggagaatgccgctgacctccgcctcattggtattcagcgcatgggcgaggaaggattgcgccacgctctccggatgcgcggcggcatagctgtgcgcctcaagaatcgcctgggtgagcgcggcggcggccggtttatgatcgcgcgccaggctaccgctgaccccaagcacgcagcagctcaggttagcgtaatcgccggtcatattgctggcgataagctgatatttaccggttgccagcagacgatagctgaagggttcgctgccgctgatggcggcaatttcgcgtttatccagcgccacgctgagtaaatctgccggatagactttccactgcacatcgcttatcggatcgatgccgtggcgcttaagcaagatggcgaagaagtttttatccggcccggccatatcggtgacgccgatggtttgccccttcaggctctccaggccgccgaacggcgagtttttcgccgtcagcaggttcaggcagccgccgtgggttccagcggtgagcttcacgtcgaagccctgctccagcgccttcagccagcgcagcgccatcccgacgccggcgtcggccttgccggtggcaatcgcctccagcagcacgtccgtcgagttgccgaagttaacgaactccacgtcgagattgtatttactgaagatcttctgctgctccgcgacggcaaccggcgccaggcacaccgcgcttttgttaatcgccagcttgattttgtacggctgcgccaggcgcagggccgggtgttcctcaccgctcgccatggccgccatatcgtgagcccaaaggggcagagaggccccggccagcgcaaggctgccggtcaagcgtaagaaacgacggcgagatgtcatcatggcgacacctccgcatgggcctgcgcggcaggcacgctaaagccgttatcaaacgtcggcgtcacgtccagctttgcgcggatcagcccgttggcgaggtaaaagtccgccgtcgactgctgctgagcgaccgtcttcgcgtccagacgcagccactgcgactggcgattggcaaactgcgcgcgggcgatatccgccgggaaacgaataatttcccccagcgttttaccgtagctatcgagattggcgtaggcccagcgctcggcgccggccaggcgattgaggtaatcctgcagcgccgcgcgcttctgcggatccttaagggcatcatcggttgccgccaggaaagtgttacccggcagcagccctttgccgctgaccagaatctgcccctcggcggtcttcaccagctgcgtggtgtacggctcccaggtcgcccaggcgtccaccgaaccgttgagcagcgccactttggcgtccaccggcccgagaaacacccactgcacctctttcggcgaaattcccgcctgctccagcgctttcagcgccacaaagtggccaatcgaccctttaccggtagcgatgcgtttgccttttaaatccgcggcgcttttcaacgcgctgccgggcgagaccagcaccgcggtgccggccgggttacttttatcgacggcgatggctttaaccggcgcgccgttagccagcgcgaacagcagcggcgcatcgccgataattcccgcatccaccgccccggcgttaagcgcttccgccagcggcgcggcggccggaaactcggcccatttaatctcgtaaggaagatcctgcagggcgttggctgcctccagctgcgaacgcatgccgcctttttgatcggcgattcgcagggtgattcgctcctgagccgccgcatagccgctcagggccagcagcataaccaccccggctaaaccggtaaaattaagtctgcgcatatgaattatccttatttttgaaaagcgtgtttgccggccgccagccacgcgctgtcgctctgcggggtatgtacccgcccgcacagcacgttgcgatagtggcgttccagaggattttgccgactcaggccatggttgccggtcagctccagcgccaggttcaccgcctgaatggcgttgtcggtaatcgtgactttcgcgagattcgcctcaatggcggaaaagcccagctgcgcggccttttccagcagagtgcgattgaccaatagccagccgtcaatctggccgactttttcctgcacccgcggcaggctggaaaggggttgcccaaggctgcccggaatacgcgtacccagccacgttaccagccagtcgcgggcggcccgcgcgatgctgtcgtaaatcgccgccagcagcgccgtatggcggttggcaaacagacgaaactgttccgcatccggcgcgggaggcgcatcggcaggccacacgtccaccgcgtgctctgcagccacccggacgttgttcagcaccacttcgtggctgccggttgcccgcattccggcgtgatcccagctgttcaccacggtaatgccctcactgtcgcggggcaccagccaggtgccgaccagcggcggagcgtcgtcgctgcggccccagatggccagccagctcagcccctcaataccggtggtatagattttatggccgttaatctgccacccttccgcgcggcgggtcgccacggtttgcggcaggccgccgcgcgccggggagcccagttccggctccacgcgcaggctgttgatcaagcctccccgctcgacggcatcgtgaaaaacccgctggcgcagcggctcggaccagttctcgttttccgccagccgcagatggtgcaggtactgcatgcagacgatcagcgccgtcgccggttcgccccaggcgatggccgcaatggcctgctgaagctcggctaagccggcacctgccccgccgtactgctgcggcacggcgaggcttaaaaaaccgcgctggcgcagacggtcgatattgtcgcggggaaagtcgccgctggcgtcgagactggccgcctgctccgccatcagctggcgtacctccgtcaaccgccgcgcccagtcatcgcttgtctgaccgatcacgaggcgcgctccgccacggcgcgcagggcggctttttcgcgggcgatcggcagcagcgctttaccgtactcctgagcatcgttgagcgggtcaaatccgcggatcaggaagttgcgcacgccgaggtcgtagtagtcgagcagcgcgtcggcgacctgttccggggtgcccaccagcgcggtggagttgtggccgccgcctaccagctgcgcgatcccggtccacaggcgtttatccaccaccttgccctgcgccgccgtcgcccgcagacgctgcgccccgacgctgtcgggcttggctttgaaaccgcctccgctctgcgccgcccgctcggtggcgacgtgcaggatatgctcggctttctcccaggcctcggcttcggtcgcggcgataatcggccggaacgagacgctgaagtcgatttcgcgctgatgtttcgccgcctcggcccgcacgcgctggatggtttccgcggtttgcgccagcgactctccccacagagcgaagacgttggcgtgcttgccggccacggcgatggccgcttccgacgaaccgccgaaatagagagggatatgcggtttttgcagcgggcgaatggccgaccacgcctgttccgcctgataaaagtcattggcgatatccaccggctgttcggcggtccacaccttgcggacggtctcaaggaaggcatcggtacgcgcatagcgctgatcgtgatcgaggtaatcaccgtcgcggcgctgctcggcgtcattgccgccgctgatgatatgtaccgccagacggccgcccagcaggtgttcaagggtagcgaacttacgcgcggcgagggtcggcgagacaaaaccgggacgatgagccaacaggaagccgatcttttgcgtcgacagacccgccagcgcggtcaccaggaatccgtcgggttgatcggaccagtggcccaccagcaggcggtcaaacccggcggcctcgtgggtttgcgcgaaacgcacgatgtaatcgcggtcaaaaatcgggccgaccggggcgatggtttccgacgacaggcggtggccgatcatgccgagaaattgaatgctcatgcagaactccttgtagcaggataatgagtgggccgccgcggcggcgcgttttcattaccctatacacgggctcttaatgaacaaaatgcatttttatcatatcttaatatgcgagataagcatttataaaaattatatatacgtttcagccagataagtttagctgctgaacgactttgccggcgaaaaaagtcagcggctggctcagattggccagattctgcgcgtgaaccagccacagatgcacctcgggctggaaatccgccagcgtcaataccgtcacctcgtcgcgccacgggctggcggccagcgcggcgcgcggcaccaggccaagccccagcccctgcgccacgaggctgatttgcagctgggcgcccgcggtctcgacattcagcgccagacgcagcccctgggactgcagttcgcggatcagcccggcccgcaggccgcagccgtcgggattgagcacccagcctttttccgcgcagtcgcgcagcgccccggcgtgaagacgccagcttttagccgcaattaccacaatatccagcgggcacagcaggcgcccgccgtagccctcagcaaagcgttgctgttccggccccatcgccagcacgccgtccagctcgacgctttcaaggcgcttttgcagcagcccgctccagccgcaggtcacctgcggtcgcagggcgggaaactgctggcgcagcgcgctcagcgccggctgcagggcaatttccgccacgctctgcgggaccccgagacgcaggataccgtgcggctcggcctcggggtcgagcaggccgtacagctttttggtctcccgcttgatgctcaggcactgctcgtaaacccggtgcccggcggcggtcagggtgagcggccgggtctgacgctccagcagcgttacgttgagggtttgctcaagacgctgcagacgacgggtaatcgccgattgggtaataccgagatattccgcggcctggttaagcgaggagaactgcacggtggccagcagtgcgtcaatgtcgtcgatgcgcatagcgtccttaatgtgatttttgcatattaatatatgcggaaattgcattttaattatattaacgcctttgctagcgtaaagaccagtcccgacaacaggaagcgaccatgaccgcaccgcgagtggaaaaattacgccagtttattcaagaccttgatgccctgcatcgcgaatttgccgatgaacagcccctgctcgacgccgtggccctgcgcctggccgcgctggtgaaaaaggatgactggctgccggaggagtacaccctgccgcatccccaccactatcagcagtatctgctgcatgccgattccggacagcgtttttccattgtcagcttcgtctgggggccggggcaatcgacgccgattcacgatcatcgggtgtggggcgccatcggcatgctgcggggcgcggaggagaatcagcgctaccgcctggacgagcgcggccagccgatggtcagcggccttgctgaacgcctttcccccggtgaagtggaaaaagtctctccccgcgacggcgatattcaccgggtgagcaacgccctcgcggatagcgtctcgatcagtattcacgtttacggcggcaatatcggcggcgtcaggcgagcggtttataccccggaaggcctcgtcaaaccttttgtctccggctactccaaccgccacttacccaatatctgggatctctcaaaggataattaatatgcccacctgttcttatcgcccggccgcccagctgcgccagacgctgctggacggcgccgagctggcgctgatcgacgttcgcgaagaggccgactttgcccgcagccatccgctgtttgccgctaatctgccgctcagcaagctggagctggatatttttcggcgcgtgccgcgcctgacgacgccgattaccgtctatgacggcggcgaaggtctggcggagcgggccgtcgagcgcctgcagagctggggctacgaagatgtcgccctgctggaaggcggcctgccggggtggcagcgcagcggcggagagctgttccaggatgtgaattcgccgagcaaagcgttcggcgagctggtggagagcgagcggcataccccctcgctgagcgccggggaagtgcaggcgctgctcgatggtcaacaggaggtggttgtcgtcgacgcgcgccgtttcgatgagtatcacaccatgaatattcccggcagcatcagcgtgcccggcggggagctggcgctgcgcattgagggcctgattccatcatcgcaggcgacggtgatcgtcaactgcgcggggcgcacgcgcagtattatcggcacgcagtcgctgcgcaatgccggtttgcccaatccggtctacgcgctgcgcaacggcaccatcggctggaccttagccgggtttgaccttgagcgcggccagcagcggcgttatgacgccgattttcgcgccccagccgaacgcgcggcggcggtgaggcagctggcggagcgagccggcgtcgcctttatagacagcccaacccttcagcgctggctgcggcagcccgcccgcaccacttacctgttcgacgtccgcagcccggaggagtacgccgcaggtcatctgccgctgagcgttagcgcgcccggcgggcagctggtgcaggaaaccgaccatttcgccagcgtgcgcggggcgcgcattgtgctgattgccgatgacgagatacgcgcgccgataacggcgtcctggctggcgcagatggggtgggaagtggcggtattacgcgatgcgcgcgcggaagattttagcgagcgcggtacccccgcaggccgcgtaccgccgggtccgcaggcggaggagattgccccgcagcagctggcggcacagctgagggagccgggaaccgtggtgctggactttaccaccagcgccaactacgtcgcccggcatattcccggcgcttactggctggtgcgttcacagctgcgccaggcgctggaggtgctgccttccgccgagcgttacgttgtcacctgcggcagcagcctgctggcccgctacgcggtgcctgaggttgcggcgttaaccggtaaaccggtgcagctgctgagcggcggcacgctggcgtggattgacgccgggctggcgctggagcatggcgagacgcatctggcgacgccgcgcagcgatcgctatcagcgcccgtatgaaggtaccgataactcacccgcggcaatgcaggcctacctcgactgggagttcggcctggttgaacagctgaagcgcgatggcacgcacgggtttaaagtattgtgatgtcccccgctcgcgctgcgcttagcggggctacgggctcactgccgtctgccataccgtcgcccggacagatgcgcagcatcgcctccgggaaattatgccgaactgcgctctgctcccgggggcggcgcaagcgcctgcccgggctacaggtccaccgccgtctgcgaacccgtcgcccggggaagggccgcaatcagatctccggggtatttttaaagcccatcagcatcagcatcggctcctgctgcgcccccgccgggtcgaaatgatagcgattgccctgacggtcgccgccgatataccacgagatctcggttttgccttccgccagcgccttgcgcaccgctttatcgacatccaccatccggtattcgcgtttggaattgaggtacagcgacgcctccgaactgtagttgcagggcgggcgatgattccaggtcacgctgttcgcgctccagtcgttgctcgccggatagaaaaagatctgatccgcgccgttggtttccacttttccgccgtagatccgcagctgatatttaaacagcgaggcgtcctgatcctgaggcagcggcgggatagggaatttcaccagcgtcatggtttccggattgtgcgtgcgcccgccgttttgccagttatcgctgaccaccaggttttccggcgcgggatgggcgaccgtcggcgcggtgctgtccaccagcgcattctccttcaccgtcgtgaagcgatacggcaccgcgctgccgcagtcgattcccttgttcatgcagcgctcggtcatatagtgcgccccttccaccgtccagccgttcataaaatccgcgtgcgccgtatagatactgccccagcgctcttcgcgcttctcaccgtccatgatcggatccagggagagctgaatcttcgcggtatccagagatgtaatctgcggcagaacgtaggccacattcatattcaccgtcgggattttcaccggatagtcgctcggacaggcgccgttgacgtcgtatgccgcgttactgtgtccgtgagccggtttgaggttgaccccatcccagcagttggggaactgaataccgatattaaactgtaccgcatcgccacctttccgcagcccacagacttcgccggccttgttgctgtagcctttgccgttagcgcacaaaaaggtgatgcgcgagctgggcgccgaaccgtggtgatcgcccgccagcagttcgagacccgccgggaacgggtgcagcggatactgttccactttggtggtctgatagtaggttttttgatacgccggcgtcaccacctgaccatccggcagcttcatcgatggcacccagtaggcggaaccgtcggccttgttatcgcaggtggtttccggctggtcgcgcagcgtctgataggtggaaaccgcatcggtatgggtattaccaaaaaaatcatgccacatggcctgattcggtttgccgaacatcatgatggcgtcatcgcccaacgtatggtgataagcgcagaccacgtgggcctgcgggccggcatgagcggaaaacgcgccggcaaccagcagcggcgcgagagttaaagtgaacgcgttcaatttcattttgcaatcctccttgtttgaaggagtgcagagatagcaaacgcccgccgatgttacacatcatcaaacatcatttcgtctcatcggcccgccccatcaggctcgcgcatgatccatgagtactgaaatgacttcggcgccgggaaatgcgtgcgccgacgaaacgaccccagccgctgcggcgtgcagtaggtgcagctccccagccactccatgttttcctccggtacgcccgcgctgcgcagcaggaggtgggcaaaagcccgcagatcgaaccacgcattgtcgcccgcggtcgctttcgcctgctccccctccgacgccgcctgatgggacaggaagagctgctcccgatggcgttttgccagctcgccggcgggcatcgccagcagcgcctggtagaagtcgccggtgacttcatagcagcaggggtgaatatgcggcccgctcaccaccaccagatcttgcgggtcgacgtgataacgctgaaacagcgcaaggctattttcgataatcccgctggccgcgccgcgccagcctgcgtgcacgctgcagacatagcgcccatcgcgcgacgccatcagcagcggcagacagtcggcggtcaccacgcccatcttttgcccgctgacggcggtaaacatcgcatcggcgtgggggcgctccgcctgcggcgcccgatactcatgtacgatattgctgtgaaccagtttaaccggcgccatttcgctatagggaaaggcggcggtttcatgaacgtcgagaaaggcgtagcggataccggggatatcgctcagtaagcgggatgtaaaagacatgatgctcggaagaatcaatggatgatgatttaacctatgccaaagtagagagatgcgcaaggcggattcccgggctaccagtccggtagcccgggcaaggcgcggctttaccgcgccgcccccgggaatcagcgaaaatgctcaggccagcgccgtgcgcttttgtcggctcatcagccagaacaccgccgcgcccgccagcagaatgccgggagcggacgcagccatcaccccgacggtgccggtgcccagcgccagcattttgcccgccagcagcggaccgctcatcgcgccgaggcggccaatcgccaccgccgtccccacgccggtggcgcggatttcggtgcgatagaacagcggagccagcgcgtaaagcacgctctggccgccagtggcaaacagtccggcgacaaagccggagaagagcattgcggtcagcgaggacgcggtccccagcgccagcagcgacgccagcatgccggtatagatcagcagcgacatccacagcgggctgagcttatccatcagcgcccccagcagcagcgtgccgcaggcggcgccaaactgcagaacaaacatcactcccgccgcctcgctggggctgaacccctggccgactaacagcatcggcagccagttgatcagcatatagaccaccagcagcgtgaaaaaatagcacagccacagcagcagcgtggcggtagcgttgcccggcgcgaggagcgtgcgcagcggcacgccccgcgcgctgcgctgaaacaccggcgattccggcagccagcgcagcagcagcggcaccagcagcagcggaacgataccgccgatccagaacaccgtttgccaggccgcggcaaggccgaaaaagcccagcgccgccgccagcgccgcgccgatggggacgccgcagtacatcaggctgaccgccctgccgcgaaagcgggggccggcggcctcggaggttaaggcaatcagattcggcagcgccgcgcccaggccgacgccggtcagcagccgggccagcagcagcgtgggataattccacgccagcgcagtagcgattgagaacaggccaaagagcagcaccgagcccagcagaattcgcttgcggccatagcgatccgccagcatgccgcccaccagcgcgccgggcagcaggccgaggatcccgacgctgaaaatccagcccatctgcattttatccagcgcgaacgcctgcgccatgcctacggcggcgatgcctgccgcctgcagatccagcccttccatcagggccaccataaaacagagcccgacggttaacatcaggcgcgaattgcttgcagtcgttgtttgggtcatagggtacctttgcgatatccggacaagcggagcaggtgaatggcggctgatacgttgccagccgcgcgttgcttttatttgctgcggttaagcagatccagcgcgacgtcgacgatcatatcttcctgaccgcccaccatccgccgcttgccgagctcgacgaggatatccaccgcgctcaggccgtagcgcccggcggccgcttcgctgtggcgcagaaagctggagtaaaccccggcatagcccagcgccagcgtttcgcggtcaacccgcaccgggcgatcctgcagcgggcgcaccagctcatcggcggcgttcatcagagcatacagatcggtaccgtgattccagccgagcttatcggcggcggcgataaacacctccagcggcgcgttgcccgccccggcccccatccccgccaggctggcatcgatacggtcgcagccctcttccaccgcggcgatggagttggccacgccgagactgaggttatgatgcgcgtgcatcccggtggcggtttccggcttcagcaccgccttgagggcgcggaagcgatcgcgaatatcgttcatgttcatcgccccgccggaatccaccacgtaaatacaggtggcgccgtaggattccatcttcagcgcctgctgcgccagctgttccggggaggtcatatggctcatcatcaggaagccgacggtgtccatgcccagctcgcgggcgaaggcgatatgctgcgcggaaacatccgcctcggtgcagtgggtcgccacgcgcaccacccgagccccggcctgatacgcgtttttcaggtcgtgcagggtgccaatgccgggtagcaataaagtggcgatcttcgtctggctgaccgactccgccgccgcctcaatccactgcaggtcgctgtacgcgccgaagccgtagttaaagctggaaccctgcagaccgtcgccgtgggccacctctatcgaatcgacgcccgcgcaatccagcgcccgggcaatctggcgcacattgtcgagcgagtattgatgacgaatcgcgtgcatcccgtcgcgcagggtcacgtctgagatatagagttttttgccgttcatgctgcttctcccgccgcgtcgttcatcgcctgggccattttttccgccgtcgccagcgccgccgacgtcataatatcgaggttacccgcgtaggctggcagatagtgcgccgccccttcgacctcgagataaaccgccgttttcaggccggagaagcggccgacgcccggcaggtttaccggtttatcttccgggatgacctcaaactgcacctgctgcttcaggcgatatcccggcacgtaggcctgtaccgccgccgccatctcggcgatcgacgcggcaatcgcctgctgcgatgccgcttcgctcaggacataaacggtgtcgcgcatcatcagcggcggctccgccggattcagcacgataatcgctttgcctttcgccgcgccgcccactttctcaatggcctgcgaggtggtttcggtaaattcatcaatgttggcgcgcgtccccggcccggcggatttgctggcaatcgaggcgatgatctccgcatagtgcacttttgccacccgggagaccgccgccaccatcgggatggtggcctggccgccgcaggtcaccatattgacgttgccttcggccagattggcctcgagattgaccaccggcacgcagtacgggccgatggccgccggggtcaggtcgatcacccggatccccggcctggcttcccgcagcgcggcgtcgtttttcacgtgcgctccggcgctggtggcgtcaaaaaccacatcgatatcggcgaattccgccatctgcatcaggccgccaacgccctcgtgcgtggtggcgacgcccatgcgccgggcgcgggccaggccgtcggactcagggtcgatgccgaccattaccgccatctccaggtgctgcccgtggcgcagaattttgatcattaaatcggtgccgatattgccggagccgataatggcgactttacgtttactcatcactctcttcctctttggcgacaaaggtcgccgccactgaacctaaaccgtcgatatgggcggcaaaacgatcgccggcggtaatcgccaccatcgggcctaacgccccggtcagcacgatatcccccgcccgcagcggctcgccgaggctggccattttgcgcgccagccacaccgccgcgttcagcggatggccaagacattcgctgccgcgcccgctggagacctcttcctcgttacgggtcatgcacatcgcgcagtttttcagatccagcccatccgggcgccgcgccgggctacccagcacgtaaacgccgcaggaggcgttatcggcgaccgtatcgacaaagccaatcgaccagtcgcgaatacggctgccgaccacctccagcgcgggaagcacccagtcgatggcggcgtacagttcatcaaaggtggtatcggcatgcggcagatcgcgtttcagcaccagggcgatttcggcctccactttcggctgcagcacccgggagaacggcacatcggcgttatcgccgtagcacatgtcggcaaaaagggtgccgaagtccggctggtcaacgcccagctgctgctgcactttaggatgggtcagccccaccttgcgtcccgccacccggcggccgttcgccacgtggtgctgcacgttcatccgctggatggcgtaggccgcttccgcgttgtcaacgccgagcgcatcgcgcagcggttcaatcgcctggccgcggctttccgcctcacgcagacgctgcgccagttgttcaagagataaggttgtcatcagcactcctcaggtacgcgccagaaaatcgagcaccagctggttaaagctctccgcgtgctcccactgcgcccagtggccgcagtcgcgatagatatgcagttcggaaccgttaatgcccgccagcaggcgcagcccggcgtccatcggtacaaagcgatcgttacgcccccagacgatcagggtctgcgcgcggatttcgccgagacgcgggctaaaatccgggaactgcttcgggttggcttccaggctttggacgaaattatccagatgctcccggcgcgacagcatattattgaggcgcgcttcaaacagcgcgtcggtcaaatcgcgggtatcgaagacaaagatgttcatcatctttttcaggttttcgatggtcggctcacggtacaggccgttcagcagcttgatgccttccgtcggcatcggcgtaaacaggctcatgccgccggttccgccgcccatcagcaccagtttgccgacgcgctccggccagctgagggtaaaggccaccgcgctgtgtccgcccatcgaattgcccagcagatgcactttgctgatatccagctggtcaatcacgcttttcagcaccctggcgttcaggtcggaacgggagccgcggttgacgatagaatcgctttttccccagccggggcagtccagcagaatgacccggtagcccgcctcgaccagcgggtcgatattgcggctaaagttggcccagccggtagccccggggccagagccgtgcagcaggaccacggtttcgtcgccctcgccgcagtcattaaaatggatgcgtaatgtttctccgccctcttccacgctgaggaaacggctggtggcggcttcagtttgcggttggtagctcatcatatactcccgttaattcagttctgcgcggcggcgctcagcgagccaaatccggcaatccactcggggattggtcggtaatagcggccttcgcagcgccagcggccaaatgcggatagcgcggcaaaggcggccacccaggttttaatttcgtgcgtcgatttcccggccattgccgacagctcttcgttactgacggcatccagctccgccagccgcccctgctccagcaggctcataaagcgggtatcccagacggggttgagcggatagagcgagttctggtcctcgataaactgcttcgccgcgctgatgacccgctgctggcgcagttcacgctcgtccggcggcagctgcctgccgctgcccagcagccggtcgcgcatatgggcatcggccttcgccagctccggtaccggcggctgatgcgacaggccgccggagccgaggattaatacccgtttattgagggtggtcaggaagcggccaatggcttcgcccagcatgcgggtgcgctgaaagcccggcagcggcgacgccacgccgttgataaacaccggcagaaccggcagggtatccagcccgccgagcaggaactccagcggttgcgcaaagccgtgatccacctgcatgcagtaggagaccgccagatcgatgccctctttcatcaccgcgtgggcgcaggcctccgccagcgccgtcggcaccggcagaacgccgctggcgctgctgaagtcgccgatagcggtcgccccgatgcctaaacagaacggcggcatcacatcgtagaaaaagccgttgtagtgatcgggagcaaacagcaccaccagctccgggtcgaaggcggcaatgcgcgcccgcgcgtcggcgatggtgccgttcacttcgtccagcaccgcctgttccgggtcaacatagcccaccagcggggtatgggagaggcaatgaagatatgcgttcatatcaggccacctgttcaatcgtggttgccgcctgcgcggaagccagctgcatcttgctcgccagcgcgtcgagctttttgctcagggtttgcgggatggccacggtggcgacgaagcggtccggacgcaccacggcaatggcggtatcgtgctgcgcgaaccagcttttcaggcggttttgcgtatcgccgacgcggataacgccgggcacgttgtcctgatcgcaatgaatctgcacctccggcaccacctggataaagcgcaccccgaccgcgcgccagcgggcaatttgctcatcgttgagcccccactgcggattacagccccaggcgataatggcgaatctggcgccaatcacctcatcgagcagcgtcacctgcccgttttccagcgtcaccttcggctggataaacattttgccgaccggggacgttttgctttcgccttccgccagcagcgcgccgtcgcgatactgcggcatcggcttgaaacgcatttcaaggaagtagcgtttaaccggcggcagatagttgagcagccacgaaacgccgtcgcgcaccgcgccgtgccagcgtttcggcggcgccaggacgttgccggcggtgaccgacaggtcgatcatcgctttggcgtgatcgcgccgctcctgctggtagctgtccagcagcgcctctccggctttgccgttcaccaccagcgccagcttccaggccaggttaaaggcgtcgcgcataccgctgttgtagccctgcccctgccacaccggcatgatgtgcgccgcgtcgcccgccagcagtacgcgatcgacgcgaaagcgttcggcgatgcgcgcgttgtgggtgtagacgcgctggcgaatcagctcgacgttatccgggtccggcagcaccttgctcaatagctggcgcatcttgcgcggctcgctgagctgggcttcggtttctccgggcatgaccataaattcgaaacgccgtaccccgtgcggcagcgcggcggagacgtacgggcgcaccgggtcgcagcacaggtagacgtgcggcgtcgccagcggatcgttggcgatatcaataacaatccattgattcggcgcggttttgccttcgaagggaatattcagcgcacgacgaatgaagctggctccgccgtcgcaggccaccagccagtcggcgcgcacggtttcccgctcgccgtcgctgcctttgaggttcagggtgacaccgtcactattctggctaaaggcctctacttcgcgggaaaacaggcagcgcacgtgggggaaacggctgaggccgtcatacagcaccgcgtccacctgcggctgaataaacgcattgcggcgcgaccagccaaactcgtcggtcatcggctgaatatcggcaaagcagcgccctttcggggtgagaaagcgcatcgcgtgccacggcgtagtatgcggcagcacgttgtcgaccagccccaccgcctgcatcgcccgcagcgcctcatcgtcgataccgatggcgcggggataatcgatcagcgactcgagcttctcaatcagcacgacgctgacgcccatctgcccgaggtagttggcgatggtcaggccaaccggaccggcgccggcaatagcgacctgcgcgctgtgctgtaccgcgggttgaatatcaggattggatgttgtcattttcaaaacctcacgcttcggacaaattgccgtcaccgcacaaccttcagcagggcgacttgttaaataaatgtgaatttatttttattgtgaggtcagtatagggtcagtgatttgcgctacaatcaaaacattaccggatgtgcaccaggtgcacatgattgtttataatgatttttatagaggacgcatgaacgaaaacgcttcggcagattacaaaacggtgcgcggattgagccgcggattattgttattaaatttgttaaataaattcgacggaggcgcgacggtcggcaccctggccgagtttagcggcctgcatcgcacgaccgtcaggcggctgctggaaacgctacaggacgagggttacgtgcgccgcagccgctccgatgacagctttcgcctgacgattaaagtgcgtcagttaagtgaaggatttcgtgacgaacattggatttctgccctcgccacgccgctgcttggcgaactgctgcgcgaggttttatggccgaccgacatcaccaccctggacgtcgatgcgatggtggtgcgcgaaaccacccaccgcttcagccgcctctccttccaccgggcgatggtcggccgccgcctgccgctgctgctgaccgcttcgggattaacctggctggccttcgcgccggaacacgaacgaagcccgattgttgagatgctggccgcccggccggaagcggagtatcagctggcgcgcgagccggaaaagctggccgccatcctcgaacgcacccggcaaaacggctacggcgaaaactttcgcggctggcagcaggaggagaaaatcgcttccattgccgtccccattcgccgccagcagcgggttatcggctgcctgaacctggtctatatggctaaagccatgaccattgaccaggcggcgcaaaagtatctcgcctcgctgcagaaggtcgctacccgcatagaagaacggatgtccgatgaagaggtgttttaccaataaccttgtccatagggggtaaatcgcccgccagccattgcgcccggcttcgttatatattttaatatacagcgattcttcctttgccgctgagcccatcatgtccagacatccgcgcgttttctttgctatggcgctgttaagcgccagcctgtttgccggtcaggcctttgccgaccgcaccctcaccgaccagctgggtcgtgaagtcaccctccccgaccacgtcacccgcgccgtggtgctccagcatcagaccttaaacctgctggtgcagcttaacgccgctgacgacgtcgtcggcgtcatgagcagctggaaaaagcagcttggcccgcagtttgcgcgctttatgccggctattgagacactaccgatgccgggcgatctgacgcaggtcaatatcgagagcctgctggcgctgcatccccaggtggtgttcgttgccaactacgcgccgcaggcgatgatccagcagatccagggcgccgggatcccggtggtggcggtctctctgcgccaggatgccgcgggtgagaaaaacaaaatgaacccgacgatggccgatgaagagcaggcctataacgaggggctgaaacaggggatccgcctgattggcgaagtggtcggccgtcaggctcaggccgaagcgctgattcaatacaccttcagcgcgcgcaggctggctaacgcgccggttgccgatatcccggaaaacgagcgggtgcgggtatatatggccaatccggacctcaacacctacggctcgggcaaatataccggcctgatgatgaagcacgccggggcgctgaacgttgccgccgccagcgtaaagggcgcgcgccaggtctcgctggagcaggtgctgcagtgggatccgcaggtgattttcgtacaggaccgctacccggaggtggtcaaacagatacaaaacgacccgcagtggcagagcattgacgcggtcaaaaatcaccgcgtgtggctgatgccggaatacgccaaggcctggggctacccgatgccggaggcgctggcgatcggcgagctgtggatggcgaaaaaactctacccctcacgctataacagcgtcgatgtcgaggcgaaggcgcgggagtactatcagcgtttctaccgcgtgaagtggacgccggatgcgtagtcatcgtcatccggccctgctgcaatgtaccctcgcgctggtgacgatcgtgattgcaatcgcttcactctgcctcgggcagtatccgttaagcctggcggaagtttttcgccagctagcgcatctttctcccctcgacggcgtcgccggccaggtggtgtggtcggtgcggctgccgaggatcgtgatggcgctgctggccggcggcgcgctggggctatgcggggccaccttacagggcgtattccagaatccgctggtggacccgcatatcatcggcgtcacctccggttccgccttcggcgggacgctggcgattctgctggggctgaacgccgcgctgatgatggcctcgacctttctcttcggccttgccgcgctgatgctggtctatctgatagccgcgctgcaggggcgcgaaagcaccctggtgctgatcctctcaggcattatcctcagcggcttttttgccgccctggtgagcctgatgcagtacctggccgatagcgaagagacgctgccgaatattgttttctggctactcggcagcttcgccaccgccagctggcacaaagtcctgctgatggcgctaccggtagcctgcgccgcgatggtgctgtttaagctccgctggcgcattaacctgctggcgctggaggagaaagatgcccgcggtctgggggttgcggtgaccgggctgcgtcgcggggtgctggtgtgctgcgcggtgctggtcgccgctcaggtggcggtcagcggcagcatcgcgtgggtcgggctggtgatcccgcatctggcgcggctgctggccggcgccgatcaccggcgtcttctccctaccgccttctggctcggcggcggttttatgatcgtcgtcgatgacctcgcccgcacgctgatccaggccgaaatccccattggaatcatcaccgcgctgcttggcgcgccgctgttcacctggctgctggtgcagtcgcgacgcacaggcgcgcgctgatgaccctttccctacagttaagcgacctgctctacggccacagccgaccgctgttcgcaccgctgaacctgcagtgccgttccggcgatatctgggcggtactcggcgctaacggccgcggcaaaagcactctgctcgataccctgaccggggtactgacgccgatcggcggtgggtttacctgcgcgggcggtctcgccatcgtgccgcagcattttcgcccggcttttggctggcaggtgcgcgacgtggtgctgatgggacgggcgcgccacgttaatctgttcgctcagccaacagcggaagacgaacgtgaggtgcagaaggcgctggcgcagctggggatcgcggcgctggccgacaaggtgttttgcgcgctgtccggcggccagcagcagctggtgcttatcgccagggcgctggtgggcgccagccagaatatcctgctggatgaaccctgctcggcgctggatctggccaaccagcagctggtgctgcagctcatcagcgacctggcccatcgccagaagcgcacggtgctgtttaccacgcacgatccgacccacgccctgcaggtggcgaaccagaccttgctgctgctgcccgacggtgaatggctggcgggagaatcagccgccgtgctgacggaagcgaatcttcagcgcgcgtatggtttagcggtacgcaaagtccatccccccgggtcggcgctgccgctgctggctccccagtttacgattcgtcgctgataggcaaaaaaccggcgtctttcagtaagcgctgcccctccgcgccgaggataaagcggcacagccgctgcgccccggcgctctgttcaatctgcgccagcaggtagtcgcagcgaacattccacgccggcggaataagcagcgtgcgcagatcgctgcacgccgccatctgcgcggcgtagtgcgcatagccgataaacagatcggttaagttttcacggatcagccacgccccggcgatttctcccgccggcaccggcagcgagtctcggccgcctaccagcggccgcgcgcgcgccatgatggcggcgccgacgccgggacagcgctcttcaatgtgggagaaaagctgccaggtgtagtcgcctgaagggtcgcagcccggcgttgaggttgccaggcgtaggtccgggtcgctgagcagcgccagccactcccgcgtctcggttgttgcgccgtggcgggcggtcagcatcagctgattccgggcgaacagatagcacgccccggccagcccggcctgacgcagcgcctgcggatgttggctattggccgaggcgaacaccgagcacggctctccgccctcaatgcgctcgcgcagcagccctgccggaccaaaatggacctcgaccgggatgccggtctgttgctgaaagcgcgccagcagcggaatgaaagcgcttttcaggcttcccgccgccagcagcgttagggagggagtcataagaaccatcgctatatagtcataaatacagcgctataataacgcaggttcaggtcatttcagtagcgaatttccgccagttcgcgcagctgttccggcgtcgccaccggcaggttaaagaagcgcagataggccgggatcatttcaaacagcatgtcggtgccgcgctgaatggggcagcccgccgcctgcgccgcctgcagtagcggagtgaactcctgggccataaccacttcgccgacaaaggtgcccggcgtcaggcgctgcgggtccagcggcagcggatcgccctctttcatccccagcggcgtggcgttgaccaccagatcgtgcccctgcggatcgcgctgcatcagcgtaatgtccagccgaggatagtgctcaagcagacgcccggccagcgcttccgccgtctgcgaacagatatcgtacagcgtcagggcgctgacgcccgccgccgccagcgatgcggcaatggccgagccgacgccgccgctgcccaccaccagcgcccgcgcccctcgcgtctcgaaacctttacgcgtgataccgaggacaaagccttcgccgtcaaacatatcgccgctcagcgtgccgtcggcttcgggacgaatcgcgttacaggcgcccgctatcgccgccgttgggctaagatgctgcaccagcccgcaggtggcgattttgtgcggcatggtgaccagcgcgccaataatattggtcatcttaaacagcatcggcacaaaggcggcgtaatcctcaggcttgacgcccatcggcaccactttggcgtcaacctgctgatgagccaaccacgggttgtaaatcatcggcgctttaaatttcgcggtcggatagccaagatgcgctatcagccgcgtatttccactaatcaccattccctgctcctttaacaacgactgcatcacgttactgcgaaagttcgatacgcttgacatcgcccaggataaagacataagccgccacgcccagcagcgctgcgccgccgatataaatcagcgcgtaaaagaagttgccggaggcggcaacaatgaaaccgataatcagcggcgtcaggatcccggcgaggttagcgcagaagttaaacaggccgccggtcagaccgccaaggcctttcggcgcgatgtcggagatcaacgtccagcccagcccgaccatcccctgaccaaaaaaggcgaacgacatcaccagaatcactgccagatcgctggtcagccagttggcggagataatggtgctcgccattagcagaccggcaatgatcggcagcttacgcccgaggttcgccgagccggtggccttcagcagcttatcggagacccagccgccgaacatcacgccgcccgccgccgccagaaacggcatgatggcgaagaagccgaccttaatccacggcatatggcgctcggtggccagataggttggaaaccaggtcaggaagaagaccagcaccgtattaccggcaaactgcccgatgctggcgccgagaatctgccgtttcgccagcagctggcggatcagcggccagctaaaggcggtatgctgctctgcgccggtggacattccgccgccgttgacgatgtgctcgcgctccagctgattgaggtgtttatcctcatgcggctcgcgatagcagcgccaccacaccagcgcgaacatcacgccggcggcgccgacgctaataaacagcgcgcgccagccaaagctgcccattatccagaacagcagcggcgcaaaacaggccagcccgagatattcgccgacggtatagatcgccgtcgccttggcgcgctcctgctgcgggaaccaggcgctcaccacccggctgttcaccgggaaacagggggcttcgctgacgccgaggccaaaacggcacagcagcagggttttcaggccgaccgccaggccgtggaacagggtgaatagcgaccacagggtcagcgccagaaaataggtgactttattaccgaagcggtcaagaaagatgccgccggggatctgcgccagcgcgtaggtccaggcaaaggcggagaatacgatgcccatcatcgcggcatcaatacccagctctgcggtcagctgcggcgcggcaatccccagcaccgtgcggtcgagatagttgatcatggtgccgaccgccagcagcgcaaggataccgatacgccgccgggaaggccgcgcgccggacgcggcggccgccgtcgtgtgattatggctataagagttcatagtcgtttcctgtcatagggtacagccggatgttgttattgtgtttgcgacgttgggttgtgaaccatttgctacattactaggtgtactgcattgctgacaagcgtacagctgcatttacagcaccataaagtgcgtaaccgttgcgccgctcggtcagttcaaagaaaaagcgtccggcagaaaacgggcgggtataaaggtgcaggaattcaccgccgcttccgtcacgatcgtaaagaatttcattattcttcaacaggttgacctgaacatcctcgccaaaacgggccaacagatcttcatagtagttcgccgggatcggcagcgcgttgaccgcaaccggtgccaggctggcgagcgtggagggtaaatcgtggcaggcaaacgccgcgtgctgtaaacctgctccctgataacaggctaccgaacgggcaatttgcgtggcgcggctttgcgaaatattgagcgcgagacgaatgtcgccctgcggactgcgcaccgccaggctacgcaccagcccgtaaggatcgggcagggtctgctcatgttcgagcgtaaagccgaatacggtgcggaaaaagatgatccagttatcgcggctgtccgcttccatgccgagggccagatgatcgataccccgataatcgttgcgcggcgtgacgttcgcgcgcagatgaaaatcgcgggtgtagatatcgtcccccatctcaatcagataaataaggctgccgtccggggcgcaaaccgccgggatggggctttcgttcggcccggcatcgccctgccaggtggcgtagcctaaggcgcgggcgcgttccacgatcgccgcgctctggctgacgcgcagcgccatggcgcagagggaaaccccgtgacgctggtgaaaatgatcggcccagctatgcggctgggcgttaaccaccaccctcgccccgccgttgcgccagagggcgacgcgttttgagcgatgcgtcccctcttcggcaaagccgagctgcgtcagcctgtgtccgagttcgcccgcctgcgccggcgtggcggcaaactcgataaactccagcccggcgtagaggggcagttcagcggaggaaaacagcggcgcccggctttccggcagccgctgacggacctgctcttccagccacagcagcgcgcgatagccatctttcgccgtcgcgccgttgggcgatgcgcggaagctgtcgttaaagatctccagcgaccaggggccgcagtagccgcggcgggtaagatcgcaggcaaactccaccaggggcagctgcccctggccgggaaaacagcggaagtgacggctccattcgaggatatccattttcatcagcggcgcgtcggccatctgtacaaaggtgattttttccagcggcacgtccgccagctgcgccagcgtatcgccgcgcgccagcacgtggaaactgtcgagcacgatgcccagcgccgggctatcgacgcttttgacccgcgcccacgcctgatgccagcggttgacgtgggtgccccaggccagcgcctcgtagccaatcgtgatgtgttcctgctccgccagcgcagcaagggcgcgtaagtcggcgacctgcagctcgacgtcggcggaacagtccggctgaacgttgctgcacagcagcagggtgtcgcagcccagctcgtgcataagcgcaaatttgcgcctggcgcgttccatgttggcggcaaactgggctcggctggcgccttcaaaatcacgaaatggttgaaaaagcgtgatttttagccctaaatctgccgccaggtggcggatatcggccggcgtaccggtataatagagcagatcgttttcgaagatttcgacgccctgatagcccgccgctgcgatggcatggagcttttcgggtaaggtaccggagatcgagacggtggcgatggaacgcaacatagagtcctcgggtcattagctgacttagtgacctgaatatgtatcatttggttcaaatgcgccatgattggttgcaaaattgtgatcaatatgtgtattttttgcatctcaagaaaaggagccgttatgtccgtcgttgctcatgatgaagcgcagtctctgaaagagcggatcttcgccgccgccattaccgttttcgccgagcatggactgtcaggcgcgcggatggagcaaatcgccaccgaagcgcagaccaccaaacgcatggtggtctactacttcaagaccaaagagctgctttatcaggccgtgctgcagcacgtctacgcgaggatccgcgaaaccgagcagcagctcgggctggaaaacgtaccgccggtagaggcgctggtgcagctggtgaagtggagcgtgcgctatcacgccacgcacgctgactatatgcgggtgatctgtatggaaaacatgcagcgcgggaaatggctgaaaagttcaggtcagctgaaaccgctgaaccgcaccgccctgtcgatcctggaagatattcttcagcgcgggcagcagcaaggggtgtttcaggcagggctggaagcgcgcgatgtgcatcgattaatcagcagctttagcttctaccaggtatcaaacttttatacgttcagcagcctctacctggacgatccgatgccggctattgatgatgaagcgatggtcgcccatcactgcgatattgccgtcaaggcggttattcgctttgtgatttcctgaagcgcgcgggaagcgcccggcggcggctagtttccggaaagcgcatggaccaccttctccatcgcttcctgcgtcagcgcggaacgtttgattttcgggttcgccagggcggtacgcaccacgccggcgataacgatatgctttggctcctgacccaggtcgcgcatctccagcacgactttgcccactacgcggcacatttcctgatacagcgcctcatctttggctgtgtttcccattctatttcactctcaatttttcattatcaatcaaatcattattgatatatttcctgagtaaatcaaaccagctccgcgtttgtgcctcagagaccgcttttccctggcaaacttgtgaataaacccgcgtttccgccctctttatcttgtcaggtgatgaaaaaatgtgttgcgcataagcgtaggattagtttgcattttgttaagtatataactatagaaatgaaacatggttttcattttcttttttggatttggcaacgtataatgcccaacaaattcttattgaatggtttcagcgcattggattgcatgactaaacgcataacacgttgcctcttttcatgggctgaaccgccagcacacattcttctgcacgctcttttgttgtcacctatccttagagcgtggcatagcagctttcgtaatacaggtttaactctgcggcagtgcgcccacggagtcagattccccatccctatccttcacaacttaaagattaaactgtcatgaaaaagaccaaaattgtttgcaccatcggtccgaaaaccgaatccgaagagatgttgaccaaaatgctggacgctggcatgaacgttatgcgtctgaacttctctcacggtgactacgcggaacacggtcagcgcatccagaacctgcgcaatgtgatgagtaaaaccggtaagaaagcggcaatccttctggataccaaaggtccggaaatccgtaccattaagctggaaggcggcaacgacgtttctctgaaagcgggccagacctttaccttcaccaccgacaaatccgttgtcggtaataacgaaatcgttgcggtgacctatgaaggtttcaccagcgacctgagcgtcggcaacaccgtactggttgacgatggtctgatcggtatggaagtcaccgctatcgaaggcaacaaagttgtttgtaaagtgctgaacaacggcgaccttggcgagaacaaaggcgttaacctgccgggcgtgtctatcgctctgccggcgctggccgaaaaagacaagcaggacctgatctttggttgcgaacagggcgttgactttgttgcggcctcctttatccgtaagcgttctgacgtcgttgaaatccgcgagcacctgaaagcccacggcggcgagaagatccagatcatctccaaaattgaaaaccaggaaggcctgaacaacttcgacgagatcctcgaagcctctgacggcatcatggttgcgcgtggcgacctgggcgttgaaatcccggttgaagaagtgatcttcgcgcagaagatgatgatcgaaaaatgtatccgcgcgcgtaaagtcgttatcaccgcgactcagatgctggattctatgatcaaaaacccgcgtccgacccgtgcggaagcaggcgacgtggctaacgccatcctcgacggcaccgacgcagttatgctgtccggcgaatccgcaaaaggtaaatacccgctggaagcggtcaccatcatggcgaccatctgcgaacgtaccgaccgcgtgatgaccagccgtcttgaatacaacaacgacaaccgtaagctgcgcatcaccgaagcggtttgccgcggtgcggttgaaacggctgaaaaactggaagcgccgctgatcgttgtggcaacccagggcggtaaatccgcgcgcgccgtacgtaaatacttcccggatgccaccatcctggcgctgaccaccaatgaaacgaccgcgcgtcagctggtgctgagcaaaggcgttgtggcgcagctggttgaagatatctcttctaccgatgccttctatatccagggtaaagagctggcgctgcagagcggcctggcgcgtaaaggcgacgtggttgttatggtctccggcgcgttagtcccgagcggaaccaccaataccgcttccgtgcacgtgctgtaataatttacaggttaattagtatttcctttaaaagcgcctcttcggggcgcttttttttattctggcactagccgctattaataaaaatgcaaatcggaatttactatttaatgcgagattatctaagatgaatccgatggaagcgcgctgttttcactcgcctttttaaagttacgtgatgatttcgatgcttctttgagcgaacgatcaaaaataagtgcattcaggtaaaaaatattctcatcacaaaaaagtttgtgtaatacttgtaacgctacatggagattaactcaatctagagggtattaataatgaatcgtactaaactggtactgggcgcggtaatcctgggttctactctgctggctggttgctccagcaatgctaaaatcgatcagctgtcttctgacgttcagactctgaacgctaaagttgaccagctgagcaacgacgtgaacgcaatgcgttccgacgttcaggctgctaaagatgacgcagctcgcgctaaccagcgtctggacaacgcagctactaaataccgcaagtaatagtatctgtgtaataaaaatggcgcacattgtgcgccattttttttgccttaccttttcccgcctactgcacccttttcgcttcatctaccggcgtattattctgtaccgacaggctcgacgcggtgcttccgctagccgataccaccaccggatatcctgcccgccgggtcagcgcgcgtttaagctgcgcctcatcaaccgctttatcccccgagaattgatgaaactccgccggaagcgtataggccatggtctgcgcattgctggcctcatccggcgtcaacgggcgatgaacttcaacatagcgcttaccgtccggctccacggcgaacttgaccggctggttgataatccgtaccggcgtcccgcttttcacctgattgaataaagactggatatccgccgcgttcatgcgcatacagccggagctgacgcgcagacccacgctgtccggcgcgctggtgccatgaatcagatattcaccgttaccgtacgccagacggagcgcatagcggcctagcgggttattcggccctgcgggcacgaccggcggcagtttaatccccttctccagcgaacgggcgcggatgcccgccgtcggcgtccaggtagggttcgggattttctgccctatgcgggtcgtcatctccggcgtctccagcccctgctgaccaatccccaggggatagacctgcacctgattgacgcccggcgggaagtagtacaggcgcagctcggccaggttgacgacgatgccctcgcgcggcacgtccggcagcagcatctgcgaaggtatcagcacctgagtacccggtttaggctgcaccggcgcaatggtatcgttcgcttcaaggatcagcatcgccgccgtatcaaaacgacgggcaatcgcctgcaggttgcggtcaccctcctgtaccgtccagaactggttctcaccaatcagacgactgttggcaggaggaagggggtaatcaacggcccaggcggcgtgggacgcgctgagggcgctcagaagggcaatggtgataagagaagcgcgtttcatactgagattccttctttcgctgataaaacgccaggcctgttatgcacgacgggaggcgagcctcccgtcgtgcataacagaatgaaatctactgttttattctagctaagatttgctgctttcgcgcgaattgcgcggatcatggcttccagtccttgcgaccgcgagggggtaaggtgctgcgtcagggccattttttcaaaccacggacgcacgtcaaacgcggtgatatctttggccgtcatctggtcatagaggataaacaccaccgcgataaggcctttgacgatggccgcatcgctgtcgccgcgaagcgcaatcgcgccgctctgctcctgcgtcatcacgatccacacctggctctggcagccctgaatgatgttctgcgcggtgtgttcctccgggctcagcggcgccaggcgctgacccagttcaataatatagagatacttctcttcccagttcgcacaacggctaaagttgcgcagcagtttgtctctgtccggtaacgccgccatagttgcttcctttagcttaataatttgtggatccgctgtagccccgccaccagtcggtccacctcctccgtcgtattgtacatcgccagcgatgcccggcacatggccggcacgccgtagaacgccatcagcggcatggcgcagtggtgcccggtccgcaccgcaataccgtagttatcgaggaagctgccgacatcataagcatgatgtttgccgagattaaaggcgatcgcccccaggcgatctggcgggccgtaaagggttaaatccgccacgctctccagcgcctgcagcgcgtagcgcatcagggtctgttcatattccgcgatgtgcgtcagccccagcgcgctgacgtaatccagcgccgcgcccagcccgatgatgccgccggtattcggcgttcccgcctcgaagcgccacggcgcttttgcccaggtcgtgccttccgtcaggctgaccgtggcgatcatcgacccgcccccttcccacggcgccatctcctgcaaaatgtcctgcttgacgtagagcacgccgatgccggtgggaccgtacagcttgtgggcggagaaggcgtaaaagtcgcactccagcgcctgcacgtccaccggatggtgcatcaccgcctgcgcgccgtccaccagcactttggcgccgtgctgatgggccaacgccgtcagagcggcgatgggattttcggttcccagcacgttcgatacctgggtaatggccagcaggcgggtacgctcgtcaaacaggccggggatcgcatccagctgcagcgtaccgtcctggttcagcgggatcacccgcagctgcgcccccactctggcgcacagcatctgccacggcacgatattggcgtgatgctccatcgcgctgacgatgatgttgtcgcccgcgccgacgttggcgtttccccagctgttcgccacgaggttaatgccttccgtggtgccgcgaacaaacaccagttcctccgccgagcgggcgttgaggaatgtcgccgcccgctggcgcacctgctccatgctcgccgtggcttccgcgctgagggtatgaatgccgcgatgcaccgccgcatagccgtggcggtaaaattccgcctcagcgttaatcaccgcttccggcttctgcgcgctggcggcgctgtcgaggtaggccagcggctggccattaacctcgcgattgagaagcgggaaatccgcgcgcacgcgttccacagaaaatgtcatgccttacctcccggcaaacgctggcctatacgcgccagtatctgctgcctgagcgcctcatcgtcgatcgcttccgtgagctcggcggcaaaggcgtaaagaatcatctgctgagccgcctgctgcgtaatgccgcgcgagcgcagataaaacagctgttcgtcatcaatacgcccgatggtcgcgccgtggctgcacttcacgtcgtcagcgtaaatctccagctgcggtttggtatccacttcggataagcggcccagcagcaggttgttgttggtcatctggccgtcggttttgatcgcatgctgcgcgacgttaatcaggccattaaacaccgcccgccctttatcgttgacgatggttttatgcagctggcggctgttacagtacccgacctgatgatcgagccaggtgcgactgtcgcagacttcgccgttgaccggcatcgccagcgagttaatccgcagggtgctgttttcccccttcagctgcgtgctggtgtggtggcgcagcaccgaactaccgagcagaaaactgctgctgaaagcggaggcgtcgcgcccgagcgccaggtcgttatgggcaaaatggtagctttgcgcgttctcaaacgccagcttgatatgctgcaggtgggcgttatccgccacggtcatcgtcagccttgcgccggtaaagtggcgctcatcgttaaggctcagatagtgttcgatgatggtcgcctgagcgccgctctccagcgccagatggtggcgatagtgggcggtgttcatttcatcgctcgccagcccgcgcgtcaggtgcataatcagcagcggtttatccgggcgctggttgcgcctgacccgaatatgggtaacggtggtcgccaggctttcggtcaaatgcagaaacacttcaggctgaacggcgtcaggcagctgctgacgctcgttatccacctgcacttcatagccgctggcggccagatcgtcgctcaggctcgcgctaaactgaccgtcgacaaacaccagccgccatgcctctaccggtagcgccagttcgtcgcgccgggccgccgtcagcgtctgcggctgagcggcgacaaaggtctgattcagtagcgcgtccagcggggtatatttccagttttcgtgtttacgcgttggcaaccccaggcgcagcagctgttgcaggtgctgatgcgcctgcgggctgcgctgcccgctttgggactcaaacagatggtgccactgctgcagcgcgttactgctgttcggtaagccagccatagccctgctcctccagttgtttgaccagagtaaaatcgccggatttgacgattcgcccctggtacagcacgtggacgtaatccggcttgatataatcgagaatgcgctgatagtgggtgacgataataaacgagcgcttgccatcgcgcagggagttgacgccgtcagagacaatcttcagcgcgtcgatatccagcccggaatcggactcgtccaggatgcacagctccggttccagcaccgccatctgcaggatatcgttgcgctttttctcgccgccggagaagcctacgttaaccgagcgggtcagcagatcttccggcatcttcagcagctttattttgtcttccatcaggtcctggaagtcaaaacggtcaagctgttcctggccacgatagctgcgcacggcgttgagcgcggtttgcaggaaaaactgattgctgacgccgggaatttccaccggatactggaaggccatgaagatgccttcaccggcgcgatcttcaggggagagttccagtaaatctttgcctttaaacgccacgctgccgccggtcacttcatagtcttcacgcccggccagcgtagcggagagcgtacttttcccggagccgttcgggcccataatggcgtgcacttcgccggggcgaacctccagatccagcccgcgcaggatcgctttgtcttcaacggcgacctgcaaattttttatacttaacatcttatttcctttgttatcagccgacgctgtgttcaaggctaattgccagtaatttttgcgcttctacggcaaactccagcggcagctctgagaagacgtctttacagaaaccgttgacgatcatcgaaatcgcatcgtcttcgctgattccgcgctgcaggcagtagaacagctgatcttcgccgatacgggaggtggtcgcttcgtgctccagctgcgcgctgttgttgcggcattccacgtacgggaaggtatgcgccccgctgtccgggccaatcagcatggagtcacactgggtgaagttgcgcgcgttggtcgccgtcggcatgattttgaccagaccgcgatagctgttctggctgtggccggcggaaatgcccttcgagataatcgtcgaacgggtgtttttgccgatatggatcatcttggtgccggtgtccgcctgctgatggccgctggtcagcgccaccgagaagaactcgccgatggagttatccccgcgcagaatgcagctcggatacttccaggtgatcgccgagccggtttccgactgggtccacgacattttgctgttctcgccttcgcacagggcgcgcttggtgacgaagttgaggatcccgccggtattgttgtcgccggggaaccagttttgcaccgtggagtacttcacctcggcgtctttatgaataatcacctcgaccaccgccgcgtgcagctggtagctatcgcgtaccggcgccgaacagccttcgatatagctcacgtagctgccttcgtcggcgaccagaatggtgcgttcgaactggccggttttttccgcgttgatgcggaaataggtcgacagctccatcgggcagcgtacgcctttgggcacatagataaaggtgccgtcggacgccaccgccgcgttgagggcggcaaagaagttgtcgttgcccggcaccacggtgccgaggtatttcttcaccagttccgggtgatcgtggatcgcttcgccgaaggaacagaaaataatcccctgttccgccagcttttcgcgataggtggtcgccaccgaaaccgagtcaaaaatggcgtcgacggccacttcccgtccttcccgcaccggcacgccgagaaggttaaacgcctcttcgacttcgctggtcagaaacgcgctggaccccgtttgctgcagcgcgccgggctcagaggcgcaggcgtcatcgcagttgccgcaggagggcgctgaataatagctgtaatcctgatagttcagcttgtcgtagtgcgccttcagccagtgcggctcttccatcgcctgccaggccttaaacgcgttcagacgaaactccagcatccattctggctcattgcggcgcgcagaaatcgccctgaccacctcttcatttatgcctttcgccagctcatcggtccgtagctgagtgaaaaagccctctttatagttgagtggcccgccgctccaggttttgacatcgtcagttgcttcagtattacgagacatagttactccgcctgaacgccaaaactttcgccgcagccgcattcgtgctgggctttagggttatgaaatttgaagatttgatttaagccttcgcgaacgtaatcgagctcggtgccatcgataaacggcatcgcctgcagcggcgcccacagcttcgcgccatcgcgctcaaataacagatcgtctttcgccggttcagcaattagctcgagaacgtagccaaaaccggcgcagccgctggttttaacgccaagccgcagcccctgcatatccggctgtttgcggaccagatcgcgaatatgggcggcggcggctggggtcatgaccagcccacgccagctaaaatcttcgggattgaaagttcctgcatgtgaattcatcgctctacctcataggttgacgccatcgggccatatcgctatgttagtgataatgattatcacttcaacccatgcagagaaggggtatttccccattcagtgctttttataagcatagaccctgacagaagagatatcggagatggaataaattgttcaatgcattgattaataatgcatttcagtgccagaaaggtagaaattgcaggaaagttaaaatatgcatcggaaatacctatttttgagatagcgaatttgcgttgcgtagaccccaccgtgaagggcaaaagagtcacaaccgcgtcctgcgggtaaaaaggagaaatggcggacgttatctttcccggtcatgaggcaaaaagaccgcgctaaccacggaaattaaaagggcagcgccatggcggcgatggaggcgctaccgcgtatcgctaaacggatgcccgtttaattgtactgcagcgtcatgaccacaacagcactaatagttccgggcgtcgcaccgcctgacaccgattttaccgaggcctgcatagccagggttgcggttctgtcagccgcgatattgtgggtgatgctggaacccgttcccttaagcgcgccgctgcccgcttcactcatcgctaccgccacgttggtggccgtaccgctattcagataatagtcaggaccggcaagcggatcgggagcgccggtgaaggaggccgttacgctgcgcgttcccgccggacagttggtaaacagcaaattaaaggccacagggtcggaggatgacccgggcgtggccatgttggttgcctgaatatcgcccagattgacatcgaggttgctgtttcccccattgaatatacagggcgaggcgacaatatttcccgtcacccccatcgtcacgctatcggcagaaaaaacgttccagcacagcaacgtcagaataagcaattttttatggcgtattttcattttttcacccgttactggtacgtcaaattaagcgtggcggtcgcatttgccgagccggattcaacggaagttaaggtctgataataacgggccgtcaacggcagcgtttcttgcccgcccgatgaccgttttaataacaacgggctattgatggccaacggcgcgccattatataaaagctgcacgccaacgccctttgccgtaccggcgctgccctgccccgttaatgccattacgctggtattggcgctgtcgggattttgtacgccgctcagcgaaacggtgatattggtgccggcgttgcagcttaaccccagattttgcgtattctgcgcgccagcgggcgtggtgcctaccgtcgagccgaacgttgaagcgggaatatcgccaatgatgaagttcaactgaggcgtagtgatactgcaggccagcgcgttgattgtcccatcggtgagtgttgtggtcaggccatcgcggtagacgccgtcgctgccctggagcgtcaccaccccgatcgttcccggcgttaatgcgcctgatgacacctggccggtaaccacgagctcaattctgccgccccaccactccacgtatgaggcctgcgcctcataggaaaatgtattgcttgggttttcaaagtaattcccggaagagaagcgaataccgataccatcgacattagtggtgtaaacatgattaccgtagctgctcggattcccaccaagataccgcatgctgaatccaagcattaacggattagtacaaccggttaaataggaggtggttttcgtcgcattctgagaaaaaataacggtcccgaccggcgcatcacgcggtacggtaatcgttcccacggacagagtggagatctgcggggtaatggtggtgcaggttccggcacgcgcgttattccatccggctatcaagccgagcaaaataacagagtaaatcaatctcatgtttaacgttcctggtgacaactggcgctaacttctgttattccagcgtaggttgattgtttcggcaggctgaaatcagcacggcactgttggctggactcgcgaccccacgtgacgatgattgccccctgctcgcgcattccgcttaaaaaaacctggccgcgatcgccaacgataaagctgctcttattatcatccgcaagcgtcaccaccgccccgaacggcacgaagcggttattgtcggttaaggtcatcaggaccctgcgccccactttggaaagataatcggcgcgcaccaccgcacctcgcgtcggggtaaccgtgtcggtgtttatctccagctctacgtcctcaggcatattttgcggatcgagcgtcaggtcgttttttcgatagacggaaatattgctgacgaccgtatatccccggtagtccgtgcgcgcgccgggttggttgcgaatattcacgccgtgtgcgccgggggcttttatcagggcattggtttcaccgagcggttgggaaagcgtgatgccatcggcgtgggcgataacgcccccctgcagaccataattaagacgctcgctgtttttgtcgtagctataccccgccgtcacttcgccgtacgtccctttatagtcaccgttcatattgccggtgtaacccacgccatccgtaccgtaaccctgctggacgttccagttcagcgagttgttctccagcgcgacgccgttcatgccgatattatgcgtcgttccaccattcttgctggcgttcatgccatagctggcccacgtttgcgggaggaatttatccaacggtacgctgacgttaaacgccagcagctggtcgtgggcgctgttactcgcgctgtcgtttgacgtcgcgctaccatttttgctgtatgtccaggtcaggccgtagctgatattgcgccagtagttgttgtatccgacgctccaggaagccatcgacctggcggagttccagtaatcttccctcgccgcgctgagggttagcgatcccagttcgcggctcagcgtctggctcatcgtcagctccgcgcggttacgcctgcggtcctgcagcgcgctgctgtctccatatgaatccagaacttcctgcatcccgtaatagccgctggtggaatagcggtatcccgcaatggaaaagttggtcccggtatcgatgaagtttttgctgtatcgcgctcgccaggattggccgcgcgatttatccgttttatccggcgttgaccaggcctgcgtgacatccgtggagatagcgcctaacgcccccatatttttacccacgccgaatgccagcgactgatatttgcttgactcctgcaggccgccatagagggtaaagccatgctgcaggccataaattgccgttgtctgcccgaaaggggttttatccacgctgctgttatatgaacgatactgcccgccggtgatggcgtatttgaaccgggcttcccgctgcagtacaggcagcgaggcgtagggcagcgtgaagtgctgttcgctgccatcggcttctttaatcgtcacgtcgagatcgcctgccccaccggtaggatacatatccgtgatttcaaaggcgcccggcgcaacgtagctttggtagatctggtagccgttctggcgcaccacgacctgcgcattggttcgggcaatgccgcgtactacgggcgcatagcccttaagagaatccggcagcatgtcgtcatcggatgccaactggccgccgcgaaacggcatactgtcgaacacgtcggcaggcgcagagctgtcgccaacggtaagctgggctttcagaggaataatggcccgctgcgcataggtataaacggtatcccatttatcctggccggaggactcccgtgaccaggtggtatagttgcgaaaacgccagggtccgatattgatccccggacgcaggttcgcatactggctgtcgcttctgccgccctggcccgttttcgcccgagtgttcgctccgctcaggctgtaattgagcaatgccgcagtaatcccctcatcccacatttccggcggtacatagcccctggccggcaggtcgatcgccgcctggggaatactgataaccagccgctgggcgccaaactgaaaatcagcgctggcttgcggaatagcctggagattggcgcaatcactattttctaccgacagctggggaaaaagttcggttttcactccccactgttttaattgttccacgctcagacagggctgtaatacctcattaccacccccgttttttgccatcgaaaaaggaatatcccgggtgtccattaactggtcatcaagaataatatccacatggtatgttcccggcgcctgagagcccgattcaaaagccgataaatccgctttgcccacgccgggattatctaactctaccagggccgtattaaacgaatcactggcatacagttccggagagaaaccggttaacgctatggcgataagcgtagccagacgagcaggtcgcaacttattattttttattgtcatcgctattacctatttaacgctgggcttgccatttactctgggattacaaactggcttgatgtgacggaccggggctgccgtagtcattaataactttaaatgtcagggcattgccggaggccccgtccggcatgcggaatcgggtggtcgaacccggcatgacgtaggtcacctgggcaagcatttttccgcccacggtaatttcattgaaattaatgacgtaaggcgttgggttattaacctgaagttcattgccgcttctttgccaggtgagtttattcgcctgttcctccggcgttgaggcgcgaagcgtaacgggacggtaaatcagcttgatgcgcgtttttacggcaatttgcagggagttcatctgctttgatgccgagggaatcgctttaatatttatccagaataaactttctttggtctgaggcagtgaacctgtcgcgacaattcgctcaatatttttttgtccgctgtcgaggcgatacatcggcggcgtaataataaaaggcgctttaccagaaccaacgtcttgatcatctatccatgactgaattaaataaggtgtcgcatcaggattattaacgctgattgacgcttctttttttgcaccatcgaaaatgatgcgcgtgccgccgataatcaccccggcagtagcgcttgcctgcaccagcgttaacattgttatcgccaggctaattgttctgataaaacgcattttatacctcttaaaacaaaggggccgggccggccccctactgattactgcagaaacttagttgtaaaccactgagaagttcgcgaccgagttagctggaccggcgactaccgtcgcagcggtcgacatatactgcgcatagaaattcagcgtattatcggcggtgctgctgagtatgtagctataaccgttgctgccgtgcagaggcaggtcggctttatccgccgtcatcagattaatggcaacaccggttgcggctccgacaaccgacgagtcaatggccagcaggttggaattgtctggatcgggcgtgccatcaaagcggactttggcattggtaaccgtcaccggacagttcttcaaaataatatcgaatttcgtcgcggcggttctcgaaccggctaccggaaattcagttttataataatcgcctaaaacaaccacctgattctgagaggcgacatcgatgtcgcaggcggcatccaaaatattgccattaaagttaacggtacccgctgctgcgaaagcctgagtcatagataatgcagaacctgctgcaagaatcgcaataacaattttctttttcataacgacacatcctgttttactttatgtacattctggcaaaatatttaataaacgcattttgccattactttaatatattgccgggaatcaatggtatatatcacaccactgcttcattttattaaaaccggattacccctgccgacgagacaaaatttatacaacattttttcagcgcacaatctatttcgcggtctaaatgtagactcagaattaacaaaaataaaacatttaaattaagatattacttaatcactcggaccccggtctacttttggacccgggaagcaaaactaacaaaatcaataaattataaccataacccccccgggtctattattagaccagacgccaatattccctgacatgctgttttttaagataattcccaacatcgatcaaaaaacgatcgcataagttagtgaggtatcttatgaacacgcgaattattcctgaactcggcagcgagccagcagaagtacttgagataaaaccctttaagcacattgagaaattaattgataatatcctgccgtacgccgagagacgtatagtatcgaaaggggagatcgttcattattacgataatgacattcgtcagtgttttttacttatccagggcagcgttgctctgcatcgtcgcggagacgggattgttttaaactcagagtcatcgccttttcttctcggcgtatgtagccagttttcctctgaacgtctttacgtcagggtactggaaacgtcagaaattgcggccgtttcgctggaaacgtttaatcgcgtggtggcccaacagaatttatgggagcatttttcaaagcttctgatctataccgcatcgcgggtttatgagcactgcgcccagatatcgcaaatgtcagcctatgatatcatccgttttcaacttgttgaattaatgcaagagcccgaagctatccggcaaaatatcaccgcggcggcctatatcaaaagtcgcacctatctttcccgcagcggcgttatgcgcatcctggcggagctaagaacgggtaaatacattaccatggagcgcggagtgctgattgacatccaccacctgccgcgaaagtattgattgttcatgtatcttcggagtggcaagagatacgcgcgaggttataataaatccgatctccttcaggattttctgactatgtcatctgcaaatcaacccttccgcggctccccttacgcacaggaatttatttctcatttgcagccctactgcacgacgtaccgaacgggccgcggcgagcagtttgatcttcaggttaacggtcaagggatgtgttacctccttctggaggggacgatagcgatataccgaagaagtgacaacatgatgctttccacggcgctcagtcccgcccttttcggcctcgctaacctgacggacatttactttgatgactattttaaaaccgtcacgccgtgccagattggcgtactcacgacccgtcgcgtcgaggaaatcattaaagagaaggcgctatggggactgctctctaaacagctgatgtttgtctataaccgcctctatcataacgttatgccccagggcacgccaacggcgtacgagatgattcgccagcagctgatcaagctcatggaggaagaggagggttatcgctacagcgtgacggctgaaagatatatcagagagaaaacccggctttcccgcagcggcgtaatgcgcattctggcggctctgaagaccggtggtttcatcgaaatggaagaggggaaactcataaaaatcaacaaacttcctgctaagtactgattatgcggatagggctttcggccctctcgcgatccggcctgcgcgccgaaatgcattcatgcaacaaattctattcgttttcattataagtattgtcatttcacagaaataaagatttattcactgctgactggctcatgtagaatgcgctgctaaatttccttcatcttttacgcaatgtcgccctggcgaccgttcgggaacctgtgtagtactgaattatggatatagaaacagatgtcatgtcgatgtgtatggtcgtgttgttaattattagcgtgttgctcgattaacctcttccccccgtaaaatcagtacgcctcgccgtcgccggacaggccagtctattcgctacgaacccgatccaaatcgaaatcgtaccgttcccccgcgcggcctgacctgccagcgtattccgggataagcgttgagagaggcaatattgccctgtcgggcatggcgcgaatattaaaaaggctgccaacgatggtggcagcctcttcactttatggcattgctggtgcgaagagcgaattagctcctgatcttcctgtagataaacaggacaaccagcgcaccgatcaccgccacgacaaagctgccgaaattaaaaccgtctacacggccaaagccgaagaaagtactaatccaacccccgacaactgcaccgatgacacccagaattacggtaacgataaatccgccgccgtctttccccggcataatccacttggctaaaataccggcaataagcccaaaaatgatccatgaaatgatacccatagctagctccgtcctcttgttaccttgtaaatatctggtatagaaagattagcataaatattaatgatgtttcataaaattatatttagcatatataacttgtcagcgcggggataatggtctacgccctgaacgcgtaccggacaaataatcagcaagcggaagtatcgcgtcgcggataattaaaacctcgggagaggcagcgataagccaggatttttcttattaaaagtgaaactgaaagcggaatacaaaagcagcaaggagggacatttccctccttgctaacttagatgactgcggtcgtcagccgcgacgaacagcaaaggcgcccctgttcatcaaagatgtcgatttgccacacctggtgacgggagccgacgtgcagcgcgcggcacacgccgcgaaccctaccgctgcgcaccgaacggatatggttagcattgacctccagccccaccaccttctgctcgccttcgctacacagatagccggccaccgagcctaaggtttccgctaataccaccgacgcgccgccgtgcagcagcccaaacggctgatgggtgcggctatctaccggcatggtggcctcgatggcgtcatcggtaagggcctcgaagcgaatatccagcaggccgaccatattcccgtcgcccatggcgttcagctgttccagggtgctctgacgtttccaaatcatcccataatctccagtagcgcctgcagcggatggcgtacgccgctgccttcaatacgcttcacctggctacgacaggagtagccggtgaccaggcagcgattacgcggcaggcgctgcatcgcctgctgccaggagagcgcgtagatagccagcgagttggcgtgattcttcacttcatggccgtaggtaccggccatgccgcagcagcccacgttaacgttttccagcttcgcgccaaaacgcgcgaagatatccgcccactgtttggtggaagcgggaagcgccgtgacctcggtacagtggccaaacagataccacgactcgccgccctgctcctgcgcagcggttgccgacagcgcctgcggcagccactcatgcaccagcatcacgcggaaatcgccgcgcttgtcgccgagcacctggttgtattcatcgcgatagcagagcaccagcgccggatcgacccccaccatcggcatgccgagctgggccacccggttcaggaaatcggcggttttctgcgcggtgcgcgcgaatcgcgtcaggaagcccttaatatgctgggctttaccgtttggcgaaaacggcagcagcaccggctggtagcctagcttttcgaccagttgaacaaaatcggcaaccacctgcgcatcgtaatagctggtaaacggatcctgaaccaccagcacccttttagctttctgctctgcgctcagcgcttccagctgctccagcgtggtattcgccgaacgatggccgaccatctgctgcttcagcgacgggacggagagcagcgggagatcgaccataccgatatgcttttccgacagcttgcgcatccacggctgattaataaagaagttgaacgtcttcggcgcatgcgccatcagcggcgcgtaggattcaaccgccgccaccagatgatcgcggaccggccgcaggtagcggctgtggtaaagctggaggaaacgcgaccggaactccggaacgtcgatcttaatcggacactgggtcgagcaggctttacaggccagacagccggacatcgcctccttgacctcatgcgagaaatcgtactctcccttacgcgcgtgccagctattgcgggtgcgctccaccagggtacgcaggctggcgcgtttttccggcagatctttttccagctgattggggtcgatgccgcgatccgccagcaggcgcagccattctcgcaccagcgtggcccgccccttcggcgagtgaatacggtggttgctgaccttcatcgacggacacatcgggcttttggcatcaaagttgaagcacagaccgttgccattacactccatcgcgccgcgccacgagctgcgcacggcaatggggatctgccgatcgaaggtcccgcgcttaaccgcatccaccttcatcatcggcgcatccacgccttccggcgggcatattttaccggggttcagacggttatccgggtcaaacgcggctttaatcttgcgcagctcgccaaacagttctgccccaaagaacgccgggctatattcggcgcggaagcctttcccgtgttccccccacagaaggccgccatacttagcggttaaggctacgacgtcatcggagatgcgcttcatcagcatctcttgctgcggatcgcacatatccagcgccggacgcacgtgcagcacgccggcatccacatggccaaacatgccgtagctcaggccatgaccgtcaagcagcgcgcgaaattccacaatatagtcggccagatgctccggcggcacgcaggtatcttcggcgaagggtatcggtttagcggctcctttggcattccccagcaggccgacggcttttttccgcatcgcgtagatgcgctcaacgccgtccagatcgtggcaaacctgccagccgataacgcccgcttcgccgcgcgccatcagctcatccaggcgctggcacagggttgtcacctggccgtcgatcagttcggcgtcatcaccggcgaactcaacgatattcagccccagcatctctttatccgcaacgtcggtaatgagctcgcttaccgaatgccagacaatatcttcccgcgccagattaagcacttttgagtcaacggtttcgaccgaaagcgccctggcctccaccataaacggcgcgttacgcagcgcggagttaaaggaatcgtatttaacgttaaccaggcggcgtactttcggtaagcgggtaatatccagccgcgcttcggtaataaacgccagcgtcccttctgaaccggtcaggatgcgggtcagatcgaattcgctcatctcgtcattaaagacgtggcgtaaatcgtagcccgtcaggaagcggttaagtttggggaatttatcgataaccagctgccgctgcgctttgcagcgctgatagaccgtgcggtaaatacgcccgatcgccgactgttctgcgcccagcgtttccgccagcgccgccggaatcggctgcgtatccagaatgtcgccgccgatcagcaccgagcgcacgccgagcacgtgatcggaggttttcccatagaccagcgagccctgcccggaagcatcggtgttgatcatcccgccaagcgtggcgcggttgctggtcgacagttccggcgcaaaaaagtagccgtacggtttaaggaactgattgagctgatctttaatgaccccggcttccacccgcacccacccttcttcggggttgatttcaataatgcggttcatatagcgggacatatcgacgatgatcccggcgttgagcgcctgcccgttggtgccggtaccgcccccgcgcggggtaaagatcagtgatttaaaacgttcttccgccgccagtcttgccagcagagcgacgtctgccgtggagcgggggaataaaatcgcatccggcaacagttgatatacactgttatcagtcgccatcgttagcctgtcggcgtagctggtggcggtatcgccggtaaaaccttgttgctccagtacctgcaaaaaattcagcaccagctgaacgacacctggcgcttgagaaatctgtgggatcatgacgctcgaccctgcctgactatgttgtgttgtaagtgattaaacgtttgcgtagtgcacacaactttttatcacatttttttcatatgcgcccgccagaattaagggcaaaatcaggcgcgcgaagatattgatattattatcagtacatggaattacgctgcgtcagccttgtgacgcgactgcaaaggtaaaactttatcatgattaaccccaatcagccccgggacataccgcaagttctgctgtcggtgctgtttttgtccctgattattatttcctgcctgtgggtcgttcagccatttatcctgtcatttgcctgggccggtaccgtggttatcgccacctggccggtgcttttgcgcctgcagcgcctgctgttcggcaagcgcgcgctggcggtgctggtgatgacgctgctgctctttttactgttcgttatccctattgcgctgctggtcaacagcctggtggataacagcacgccattaataaaagtgattaccagcggtaactttacgccgccggatctggcgtggctaaatagcgttccgctgattggcgataagctgtataccggctggcacaatttactggagatggggggaacggcgattatggtcaaaattcgcccctatctcggcaccaccaccacatggtttgttggccaggcggcgcacatcggcaagctgctggtctactgcggactcatgctgctgtttagcgccctgctgtactggcgtggcgaaaaggttgcgtatgggttccgccactttgccacccgtctggcggccaaacgcggcgatgcggcggtgatcctcgccggccaggcgattcgcgccgtggcgctgggggtggtcgtcaccgccctggcccaggcggtgcttggcggtattggccttgcggtcagcggcgtgccttacgccgcgctgctcaccgtggtgatgatctttacctgccttgtgcagctggggcctttgctggttctggtaccgtcaattatctggctgtactggagcggtgataccacatggggcaccgtactgctggtctggagctgcgttgtcggcaccatggataactttatccgtccgctgttgattcgtatgggcgccgacctgccgatgattctgatcctttccggcgttatcggcggcctggtggcgttcggcatgattgggctgtttatcggtccggtgctgctggcggtctcctggcgactgtacgatgcgtgggttaacgaagcgccgcctccgccgaaggaccccgacctggtgcttgaggagctgagcgaactcaatacccgagccacccaggataagtaagtgaaaaggcggggaaacccgccttttgcccctctgcccctatcgctgtcgggctcggcagccttaaagcttaagaaatcctaatctatctttcacgccattccacgacccgcggcctgctaaccgcatttgcttcgcagattctttaccttaatttaactattgagaggaatccgatcgacgcaaaaagcctcagtgcctagtattagctcacggttataaatcaacgcattgatttataagcatggaaatcccctgagtgaaacaacgaattgctgtgtgtagtctttgcccatctcccacgatgggcttttttttgtccgttttctgttccccaaaaacaaaaaatccccgccactgctgagctgacggggagtatccagttgcctgttttagcaagaacttacttattcagctccgccaggccgagccaggtttgcacgaccgtgtccgggttcagggaaaggctatcgatcccctcttccatcagccaggcggcaaaatcttcgtggtcagacggaccctgtccgcagataccgacgtacttgccctgcttcttcgccgcgcggatggccatcgacagcagcgctttcaccgcgtcgttacgctcatcgaacagctcggagaccacgccggagtcgcgatccagccccagcgccagctgcgtcatgtcgttagaaccaatagagaagccgtcgaagtattcgaggaactgttcagccagcagcgcattcgatgggatttcacacatcataatcagcttcaggccgttttcgccgcgcttgaggccctggcgttccagctcttcaaccaccgcttttgcctgcgcgacggtccggacaaacggcaccatgatttcgacgttggtcaggcccatgtcgttacgcacccgcttaaccgcttcacactccagcgcgaagcagtcgcggaagctttctgacacatagcggccggccccgcggaagcccagcatcgggttctcttcttccggctcataacgttcgccgccgaccaggttggcgtattcgttagacttaaagtcagaaagacgcacaatcacccgtttcgggaaaaatgccgcgccaagggtggagatcccttcggtcaggcgaccgacgtagaactctttcggcgagtcgtagcctttcatcagctcgcggatttcattctgcagccccggctcctgatcgtcgaactccagcagcgcgcgcgggtggacgccaatcatacggttgataatgaactccagacgcgccaggcccacgccttcgttcggcaggcaggcaaagtcgaaggcgcggtccgggttaccgacgttcatcatgatcttcagcggcagatccggcatatcgccaacggtggagctcttgacgctgaagtcgaggatttcggcatacacgtagccggtatcgccctcggcacaggagacggtcacattctggttttcctggatgcgatcggtggcgttaccgcagcccactaccgccgggatccccagctcacgcgcgataatcgccgcatgacaggtacgcccgccgcggttggtgacgatcgccgccgcctttttcatgatcggctcccagtccgggtcggtcatgtcggtcaccagcacgtcgccgggctcgatgcggttcatttcgctgatatcgtgaatgactttcaccggacccgcgccgatacgatggccgatcgcacgcccttccgaaataatctgtccttgcgcatggagggtatagcgctccatcacctggccgcgggaacggacggtctccggacgcgcctgcacgataaacagcttaccggtatggccgtctttcgcccattcgatatccatcggacggttgtagtgcttctcgatttgaaccgcttgctgcgccagctcctgcacttccgcgtcggttaacgagaagacgtcgcgctgcgcctgcggcacgtcttcgatacgcacctgcttgccgtgctcctgggtaggggcgtaaaccatgcggatctttttcgaccccatggtgcggcgtacgattgccggccggcccgcttccagcgtgggtttatggacgtagaactcatcggggttcaccgccccctgcaccaccatctcgccgagcccccaggcggaggtgataaacaccacctgatcaaaaccggattcggtatcgatggagaacatcacgccggacgaggccagatcggagcgcaccatcctctgcaccccggcggagagcgccaccccgcggtgatcgtacccttgatgcacgcggtaggaaatggcgcgatcgttaaacagcgaagcaaacacgtgcttcaccgcgacgagcacggcgtcaaagccctgcacgttaaggaatgtctcctgctgaccggcgaaggaggcgtccggcatatcttccgccgtcgcggaggagcgcacggcaaaggaggcctcagcgtcatcggcggacagctgggtataggcatcgcgaatcgcattttccagttcgctctggaacggcgtatcaatgatccactgacggatctgtgcgcccgctttcgctaatgcggaaacgtcgtcaatgtcggtttcatccagcagttcataaatgcgctggttaacaccgctttggtccaaaaactgattaaaggcatcagcggtggtggcaaacccgttcggtacggacacgcccatacccgacagatttgtaatcatttcaccaagggaggcatttttgcccccaaccctgtctacatcattcatgccgagttggttataccaaagcaccagcggtgacgagccattgttggacatcgagacaatccttttgtgatttaataccagtgataaataattcacgatcgactacgagatttatcctgacatatttatccagctgaaagaaacggtgaatcgttcaagcaaattattttttcgtttttaggattctttgccagatatagctaagctaatgattcttcagaaatctgatgaaatttgatacaaaagatacgcagttgcgaaaaatgaactcaccttttcattaaaaataaaaatagcgtttcattttttaaatatgagacaaagcctggagcgttatgcttaaatttaatatcagctttcagacaattaaactcattataccggatggtcaaaatggaaagtgctgtagatcgccacgtattttatatttccgacggtaccgctattacagcggaagttctgggtcatgcggtcatgtcgcaattcccggtcgccaccagcagcgtaaccctgccgtttgtcgaaaatattagccgcgcgcgcgccgtgaaggagcaaattgacgcgattttccagcagaccggcattcgaccgctggtgttctactccatcgtgctgccggaaattcgcgacatcatcctacaaagcgaaggcttttgtcaggatatcgtccaggcgctggtggcccccctgcagcaggagctgcgcctcgatccgacgccaatcgctcaccgcacccacggcctgacgcccggtaacctgaacaaatacgacgcgcgtatcgccgctatcgactacacccttgcccacgatgacggaatttctctgcgtaatctcgatcaggcccaggtgatcctcctcggcgtttcgcgctgcgggaaaacccccaccagcctgtatctggcgatgcagtacggtatccgcgccgccaactacccgtttatcgccgatgatatggataatctgattcttccggcttcgcttaagccgctacagcacaaactcttcggcttaacgatcaatccggagcgcctggcggccatccgcgaagagcggcgggaaaacagccgctatgcttccatgcgccagtgccggatggaagtgaccgaagtcgaggcgctttaccgcaaaaacaagataccttgcctgaacagcaccaactattccgtggaagagatcgccaccaaaatcatggatattatggggttaagccgcagaatgtactaacacactagtacattattaaaaatttgtttatgctatcacctgagccctatacaggatcatgccctgctcttgcaataagcggggattggtttatcgtgatgcgcatcacttcccggcattttcgccgcggaagaaacagattttgagaccccaatgaataaaacagacgaattgcgtaccgcgcgcattgaaagcctggtaacgcctgcggaactggctcagcggcatccagtgtctgccgacgttgccgcacacgtttccgcctcacgccgccgaatcgagaaaatcctcaacggtgaagatcgccgcctgctggtggtgatcggtccctgttccattcacgatattgatgcggcgatggagtatgcgcgccgcctgcagggtatgcgcgaacgttaccagccgcagttggaaatcgtgatgcgtacctattttgagaagccgcgcacggtggttggctggaaggggctgatctccgaccccgacctgaacggcagctatcgggtgaatcacggccttgagctggcgcgtagcctgctgctgcaggtcaatgaactgggcgtaccgaccgccaccgagtttctcgatatggtgaccgggcagtttattgccgacctgataagctggggcgctatcggcgcgcgtacgaccgagagccagatccaccgcgaaatggcctcggcactctcgtgcccggtaggctttaagaacggtaccgatggcaatacccgtatcgccgttgatgcgatccgcgcttcccgcgccagccatatgttcctgtcgccggataagcagggacagatgaccatctaccagaccagcggcaatccgtacggccatatcattatgcgcggcggtaaaaagccgaattaccacgccgccgatatcgccgccgccggggaagcgctggcggagttcgacctgccggaacagctggtggtggattttagccacggcaattgccagaaacagcaccgccgtcagctggacgtttgcgccgacatctgccagcagatccgcgccggctcgaccgccatcgccgggatcatggccgagagtttccttcaggaaggcacgcagaaggtcgtcgcgggccagccgctggcctggggacaatcgattaccgatccctgcctgagctgggacgatagcgaacggctgctggatgaattagccgccgccaccgccacccgcctgtagttcccctccccaccgtacgcgcggtggggagcgattttccgccatcgaccggcccgacacctgctaaatctggtattccgctaaataaagcttgcgtgaaaaacaacattattgataatgattatcattgttgccttgatttttatttttagtgctatgacgcgtatggataacactgccacagcagaaaaaacaacagacaatgccccgtatccggttccgacggacaaagagataagcagccggacattattaggcagcgagggacgggtggtgattgaacatcgcggtcagcgctacctgctgcgtcagacccattcgggtaagctgatcctgaccaaataattatccccgccgataaaggcagggataacgaacgttagctggaacagcttacttcaagacgccttccccagtccggtggacgctgaatatactcatccgtccgatcggcaaaggggtgagagagtgcgctatgcaggcgctccagttcgctcatatccccctgctccgcctgttcaatggcccgctgagccagccagttacgcagcacgatcgccgggttgacgctgcgcatccgcgcctgcctttgcgcatcgtcaacctgttcatcgcgcaggcgcgcgcggtaagcggtaaaccagctatcgaacgtctcgcggtcgataaactcatcgcgtagcggcgaggcggcgctctcctgctcgctggcgctgagcatccggaaggtccgcgtatagtcgctgccctcgcgttccatcagcgcaaacaggccgtccagcagctcgttatcccctttttgctgggtaaacaatccgagcttgtcgcgcatgcggcggccatacgccgtcagcagggcatgctggtaactatccagcgcgtcgttcagcgcctcagcgctgataaacggcgagagcgtctgcgccagccgttgcaggttccatagccctaccgccggctgattatcaaagctgtagcgcccctgataatcggagtggttacagataaagccaggctggaaatcatcaaggaaaccgtacggaccgtagtccatcgtcaggccgagaatcgacatattgtcggtattcatcaccccgtgggcaaagcccaccgtttgccagcaggcaatcatctccgcggttcgggtgacaacgtcactgaaccacagaaggtacttatccgcttcattttgcagatgcggccagtggtgacgaatcacgtaatccgccagctgctgcactttcagaggctcgcgacggtagtaaaaatgctcaaaatggccgaaacgaacgtggctttccgccagccgcatcagcattgccccgcgctcgacggtttcgcggtataccggcgtatcgctggccactatcgccagcgcgcgggtggtgggaatgcccaacgcatgcatcgcttccgaggccagcgcctcgcggatcgtcgagcgcagcaccgcccgcccgtcgcccattcgcgaatagggagtgagcccggcgcctttaaggtgccagtcaaagcgacgaccatcagcgagctgctgttcgccgagcagaataccgcgcccgtcgccgagctgcccggcccaggcgccgaactggtggccgctgtaaacctgcgccagcggcgacattcccggcagcagcgtttcgccgccccatacgccagcgcccttctgcgggctgaataacgacgcgtcaacgcccagcgttcgcgccagcggagcgttgtgccagacaagccgcgcattctccagcggcgtaggggttaaagcggtgtaaaaatccggcagttcatcacgccagtgggtagtaaaagacagggtcatggttcctcctgccttcagtgtagtgctttcaacaaattattaacacggaggaatggatgggttattgcgataaaagacaagacgggcgttgtggcgctgcccggtaaggcgttaccgccgccgggcaagaaaacgccacgctacgctttgacgtatcgaggctagatccttcgcgcctgccagaattttttatgccagtagacattatccagcgacgatcgcgtcacgccctggctggtggaggcgtggataaactggttatccgtgtcgtaaataccgacgtgcagaccgctctctccggaaccggtcttgaagaagaccagatcgccgggcagcagttcgctcttatcgattttcgtgccgatctccgcctgctcacgcgtttcgcgcggcagctgcagcgcgaacttatcgcggaaggtcatcagcacaaacccggagcaatcaacgccgcgcggcgacatgccgccgtagcgatacggcgctccccgccagctccttagctgctcattcaggttagcaacaacggtaatcgaatcagcaagccgtggattgggcggcggcgcccggtggctgctacaacccgccagaaataacgcaacacacaaaacgagccaaaaacgcatctcagacgaatcctctgttccctatcctgatagcaggataatttaccttgtttattaattcgctggcaagctgactgcgtgctactgtgacgcaacgagcataagatgacccgccacctcgacccgctggaagtccatggcataggcggcggttaaattctcttcgcttaatacctcggcggtgctgccgcaggcgatcgtctccccccggcagataagccaggagcgatgggcgtgtcggagggtatgattcaggtcgtggctgctcatcacgacggcaatccccgaggcgcagagttcgcttaacaatcggtccagtgcggcctgctgcgccacgtccaggctgttcatcggttcatccagcaatagcaactgtccggacgcgttagcctgacgatgaatctgcagtattaccgccgccaggcgcacgcgctgccactccccgccggagatgtgattcacctggcgccccagcttgtcgcctaagcccagcttctccgcgatggtcgtcagtagcccgttgtgcgcgtcgtcctggagatgcagcgacagataatgccagaccggcatggcgaaaggcggcatctggtgctggcttaaataggcccgatgacgcgccagctcctgcgccagccagtcattcagcgggcgtccattcagttttacctggcccgggccggtagagagccccgccatacgcgccagcaacgtgcttttccccgccccgtttggccccaccagatgaacgatctctcccggccggatatcggctgaaaacggcgccagccgccccgcctcttctacatcctgtagctgcatcaaaaacggcattatttggctaaagctcctttaatagcggccaccagctgcggatcatccggcgtcatatccggtgagaaacggccgatgacctgaccatcgcggccgatgaggaatttttcaaaattccacagaatatcatccacgtacagcggcgctctgcctttgctggccatgcgctcataaaaaccgctgccttccggggcgatagcctgcggggcggcctcaaccagcttctggtacagaggcgcgcgatgttcgccgttgacgtcaattttgctgaacatcgggaatgtcacgccgtaagtcgtgctacagaacgttttaatctcttcttcgctacccggctcctgacccagaaactggttgcacggaaagcccagtacgctaaaaccttcgctttctaaatctttttgcagcgcctccagctgctcatactgcggcgtcaggccgcactttgacgcgacgttgacaatcaacaggacgttgcctgcccacggggtgagcgttgttttctcaccatcgatggtggtgacttcagtattgagaatatcgtgttgcatagccttccctctgtgaatataccggttactgcttcaggtgatccctatctactgtagcggattcagactgggtcattctactttgaatcccccgggagtgtctcttgatgtaacaggcagcacaacatgaattcatctcaacaccgggagcgcgcaattcagtgtacagtggtggattgatgtaatagcatttcgttaattgttaatttaagagagttttattgatgaagaagatgtttagcgcggtgttaatcgcggcctccgttacgctgctttcggcctgctcgccggatgaagataataagattaaagtcgccattaataccgggccggatgaggctatctggaaagtcgtagaacaggtggccaaagagaaatacaacctcgacgtcgaggtaatctcatttaatgattacgttctgccgaacgaagccctgaacaataaagacgtcgatgctaacgccttccagacgctgccttaccttgaggcacaatcaaaagagcgcggctataagtttgccattgtcggtaaaaccttcgtcttcccgatcgccgcctactcgaagaaaatcaaaaatatcagcgaactgcctgacggcgcgacgatttccatctctaacgaaaccacaaccctgggccgcagcctgctgctgctgcaggcgcaaggtttaatcaagctgaaagagggtacaggctacctgccgacgacgctggacattatcgacaatcctaagcagttgaaaatcgtggaagtcgacacgccgcagctgacccgtacgcttgatgacccgaacgtcgccctgtcgatcatcaacaccaacttctccgctcaggccggtctctcggctgcccgcgatgggctatttatggaaggcccggactcgccgtacgtcaacgccattgttgcgcgcgaagataataaagacagcaaaaaagtccaggagctgaaagaggccttccagactcagcaggttgccgacaaggcagcggaagtctacaaaggcgatgcgattaagggctggtaatactatcaaccacttacggccgcccctcactgcgggcggcctgatttcagcaataaccagataaacaccggcgctcccagggtggcggtgaccacgccaatcggcaattccgccgccgaaagcgccagacgcgcgataatatccgcgcccagcagcgcgctggcccccgctaacaaacaggccggaagcagcgcgcggtgatcgcttaagccacataagcgcagaatatgcgggataaccagaccaataaagccgatcgcgccggccagcgccacgctgacgcccaccagccagccggtcgccaccaccagcactttacgccatagccacagcggtagccccagctggcgtgcggaaacctcccccagcgctaacagattaagaggctgcgattgcaggcacacccaggccagcacaggcagcagggccagcatcagccacagctgctgccagtccacgccgccaaagccgcccatcatccagtacatcagctggcggagatcgaaagaggttgagaagtagaccgcccaggtcatcagcgcgctgcatatgataccgagcgccacgcccgccagcagcaggcggctggtcgagagatgccgcctggcaaaacgcagtaaaataaaggtaatgaccagcgcgccagcgatggcgcacagccccagcgcccagcccggaagcagcccttttcccagcaacacggcggctatcaggccaaccccagcgccgtttgatacccccagcagcccgggctccgccagcgggttttcaaacagcgcctgcataatcgcgccggacagcgccagcgccgcgcccaccagcaggacggccagggtgcgcggcaaacgaatctgccagataaacagctcgcctttggcgctaaaccattcaccggggccaatccactggtcgcccgcgcacaggctgatggtcgatgtgaccagcagcagcaacgttaataccgcaagccagcgccggttgcggcgccgttgagtttgagcaaaggtcagcatagatttctgagttgagaaaaaggatgtgattgattttacggtattcggccaggaaaagaaaaaaggccgcatagcggcctttttgattagtcagtccagatcatttctctctgggtgaagcgttttcgacacggctttttaacttctgtccgggtctgaaggtcaccacacgccgggctgtaataggaatatcctctcccgttttcgggttacggcccgggcgttggtttttatctcgcaaatcgaagttgccgaacccggagagttttacctgctctccgttttccagagcgcgacggacttcttcgaaaaacaactctaccagctctttggcatcccgcttgctaagcccaagcttatcaaacagatattctgacatttcagcttttgtaagcgccataggttcaatccctcaatgatgcctggaatcgctctttcaatgcctctacacatttggcgacggtagcggcaatctcctcttcttcgagtgtacggctggtatcctggaggataaggctgatagcgaggcttttgaaaccttccgctacgcccttgccgcggtacacgtcaaataagtttacgccaactacctgatttacgccaactttcttacactcggctaaaacatcggctgcgggaacgttttctgccacaacgacagcgatgtcgcgacggttcgccgggaagcgagaaacttcacgcgcctgaggcaccacgcggtctgcaagcttgttccactccagctcgaacaccaacgtgcggccgttcagatccagtttacgttccagctcgggatgaacaaccccaataaaaccaatacgttcacctttcagataaatcgccgccgactggcccggatgaagcgcattattggcttcgatgcggaattcgatgtcggacagtttacccgtgaggtcgagaacggactccagatcgccttttaaatcatagaaatcgacggtttcttttgccaggttccagtgttcttcatagcggttaccgcagattacgccagccagcatcacgtcctggcgaatacccagcggggcctgcgtatcgggaacaaatcgtaggccgctctcaaagatgcggacgcgactctgctggcgattctggttgtagaccaccgtcccgagcagaccggtccacaatgacagacgcatcgccgacatttcgctggagatcgggctcggcagaatcagcgcttcctcgccggcgtggatccactgctgtactttcggatcaacaaagctgtaggtaatcacttcctgatagcctttgtcgttgagcagcgttttcacgcgcttaagcgacagatccgcttcgcggtgagtgcccataatcaggcccgcttgtaccggttcatcaggaatattgttatagccatagacgcgggcaacctcttcgaccaggtcttcttcgatctccatgtcgaaacgccagctcggcgccacggcatgccactcatcctggccttcggtaacttcacagcccagacgacgcagaatgtcgctaacctgcgcatcttcaatgtgatggccaatcaaacgatccagtttgctgcggcgaaggcggatggtcgcaggcttcggcagagtcgcttcattggtcacgtcaataatcgggcccgcttcaccgccgcaaatatccatcagcaggcgggttgcgcgctccattgcctgatactgcagcgcggagtccacgccgcgctcgtagcggtgggaagcatcggtatgcagaccatggcgacgggcgcgaccggtaatggacagcgggctgaagaacgcgcattccagcagaacgttttgcgtttcatcgtttacgccggagtgctcgccgccgaaaattccgcccatagccagggctttctggtggtcagcaataaccagagtatcggtatccagcttagcctcggagccgtcgagcaggaccagggtttcgccttcatgcgccatacgcacgataattccgccttcaatgcggtctttatcgaaggcgtgcatcggctggccgagctcgagcagaacgtagttggtcacgtcaaccacggcatcgatggagcgaatgccgcagcggcgcagcttctctttcatccataacggcgtcggcgctttgacattaatgccttttaccacacggcccaggtagcgcgggcatgcttccggcgcatcgacctgaattggcagaacgtcgtcgatggtcgcggcaaccggggccatttccgggacattcaatggcgccttgttgagcacggcgacatcgcgggcaatgccgataatacccaggcagtcggcacggttcggcgtgacgctgatttcgatagtgttatcgtcgagcttcaggtattcgcggatatcggtacccagcggcgcgtcggcgggcagttcaataataccgctgtgatcgtcggagatccccagctcggagaaggagcacagcatgccttccgacggctcgccgcgcagctttgccgctttaattttaaaatcgcccggcagtacggcaccgatggttgcaacggcaaccttcaggccctgacggcagtttggcgcgccgcagacgatgtccagcaggcgttcgccgccgacgttaatttttgtgacgcgcagtttgtcagcattagggtgttgagcgcactcaaccacttccccaacgacaacgccgttgaagctgcccgcaaccggctcaacgccgtcaacctcaaggccggccatcgttatctggtccgacagcgcttcgctatcgatagctgggttaacccactcgcgtaaccacagttcactgaatttcattgttctgtcctgcccttatttaaactgtttgaggaaacgcagatcgttttcgaagaacgcgcgtaagtcggtcacgccgtagcgcagcatggtcagacgctccatacccatgccgaaggcaaagccggaatagatttccggatcgatacccacgttgcgcagtacgtttggatgcaccatcccgcagccgagcacttccagccatttcccgtttttccccataacgtcgacttcggccgatggctcggtgaacgggaaataggacggacgaaaacgaatctgcagatcttcttcaaagaagttacgcaggaaatcgtgcagcgttcccttcaggttggtaaagctgatgttggtatcaacgatcaggccttccatctgatggaacattggggtatgggtctgatcgtagtcgttacgatagacgcggcctggcgcaataatgcggatcggcggctgctggttagccatggtgcggatctgcacgcctgaggtttgcgtacgcagcaggcgcgtggcatcaaaccagaaagtgtcgtggtcagcgcgtgccggatggtggccaggaatattcagcgcatcgaagttgtggtagtcatcttcgatttccgggccagtcgcgacggtaaagccgagctcaccgaagaaactttcaatacgatcgatggtacgggtcaccggatgcaggccaccgttctcaatacgacgccccggcagagagacatcgatggtctccgaggccaggcgcgcgttaagagcggcgctttcaagatctgacttacgcgcgttaagcgcctgctggacctgctctttcgcttcgttgataaccgcgccggctgccgggcgctcttcagcaggcagctcacgcagggtcgtcatctgaagggtcaggagcccttttttacccaggtattccacgcggacgttgtccagcgcagcaacatctgatgcctcgttaatggctgccttcgcactggcaaccagctctgcgagatgtgacatggttttcctcattatgtcggtgcagacaccggttatggttattattttgctttcactatttcgagccgcagacggcgggtcattcgccatttgaccgaatgacccggtcaatccacacgtctggagcttgaaatagaacaagccagttcagatacaaaaaaagcctccacagtgggaggctttttggcgctgttttccgtttcttctttcacgcgctagcctcctgagttcaggtgctaaagtaaaaaaagaagcggaaaatagcagcattcatgcttgcattaccttgtctgctaaaaaacgtaagatcgatattgaaaagcttacgcggataaaagtcaatgtattgatagtcttgaaacgaaaagagggagacaagctccctctttcaactggcttatgccagagctgctttcgctttttcgaccagcgcggtgaacgctaatttgtcgaatacggcgatgtcagccaggatcttacggtcgatttcaacagaggcttttttcaggccgttgatgaatttgctgtaagaaataccgttctgacgtgctgctgcgttgatacgcgcaatccacagttgacggaactgacgctttttctgacgacggtcacgataagcgtactgaccagctttgataacagcctggaaggcaacgcggtatacgcgagaacgcgcaccgtagtagcctttagcttgtttcaaaattttcttgtgacgtgcacgggcaactacaccacgttttacgcgagccatatgtgctctcctgtatctattctaattaaaaagttaaaagggttaacgacttatgcgtacggcaggcacgcgatgaccaggcccagatcgcctttagaaaccatggctttcggacgcaggtgacgtttacgcttggtagcttttttggtcagaatgtgacgcaggttagcgtgcttgtgcttaaaaccacctttaccggtttttttgaagcgcttagcagcaccgcgtacggtcttaatttttggcattttaataacttccacttcgcattgttaataaacgaaacataggcgaacaacggctgcggaacccgcaggctccacagacattgctacttgaaggccttactgtttcttcttaggagcgagcaccatgatcatctggcggccttcgatcttcgttgggaaggattcgactactgccagttcactcagatcgtcacggacgcgggtaagcacttccataccgatctgttggtgggccatctcacggccgcgaaaacgcagcgtgatcttggccttatcgccatcttccagaaagcgaatcaggctgcggagttttacctgataatcgccatcgtcggtgccaggacggaacttaatttccttaacctggataactttttgctttttcttctgttccttagaagacttgctcttttcataaaggaacttgccgtagtccatgatacgacaaactggcggttcggcgttagggctgatttcaactaaatctactccagcttcttcagctttttcgatcgcttctctcagactcacaatacccaaagcttcgccttccagaccagttaagcgaacttccagggcgcgaatctcgccattaatacgattcggacgtgccgtttgaactcgttttccgcctttaataccttattcctccagttgttttagactgcggctgcgaatctcttgttgcagcttctcgataacttcatttacgtccaggctgcccaagtctttgccacgacgggtacgcacggcaactttgccggcttctacctctttgtcgccacagaccaacatgtaagggacacgacgtaaagtgtgctcgcggattttaaagcctatcttctcatttctcaagtctgcttttacgcgaatgcccgcattttgtagtttacgcgtcaattcgttaacgtattcagcctgagaatcggtaatattcatgaccacaacctgcaccggcgccagccagctggggaagaagcccgcaaactcttcggtcaggatgccaataaagcgctccagcgaaccaagaatcgcgcggtgaatcattaccggtacctgtcgttcgttattttcacccacataagaggcgcttaaacgctgcggcagggagaagtccagctgtacagtaccgcactgccatgcacgatcgaggcagtcatacagggtaaattcaattttcggaccgtagaacgcgccttcacccagctgatactcaaacgggatgttgttctcttccagcgccacggccagatccgcttcagcacgatcccatgtctcatcgctaccgatgcgtttttccgggcgagtcgacagcttgacgacgattttctcgaagccaaaggtgctgtacatatcgtagaccatgcgaatacaggcgttcacttcatcgcgaacctgatcttcagtacagaagatatgggcgtcatcctgagtaaagccacgtacgcgcatcaggccatgcagcgcgcctgacggctcattacgatggcagctaccgaattcagccatacgcagcggcagatcgcgataggatttcagcccctggttgaagatctgcacgtggcccgggcagttcatcggcttgatgcagtattcacggttctcggaagaagtggtgaacatcgcatctttatagttgtcccagtggccggttttttcccacagcacgcggtccatcataaacgggcctttaacttcctgatactggtactctttcagcttagaacgcacaaaagtttccagttcgcggaagatagtccagccgtcgttatgccagaacaccatgcccggcgcctcttcctgcatatgatacaggtcgagctgcttaccgattttacggtgatcgcgcttagcggcttcttccagacgctgcagataggcatttaaggcttttttatctgcccatgcggttccgtagatgcgctgcagcattttattgttgctatcgccgcgccagtaggcgccagcggtcttcatcagtttgaaatgatgacagaaacgcatattcggcacgtgcggcccacggcacatgtcgacatactcttcatgatgatacaaaccgggtttgtcatcatgcgcaatgttttcatcaagaatggagactttatagctctcgccgcgcttcacgaaggtttcacgcgcttcgtgccagctgacttttttcttaatgacgtcgtagtttttctcggcgagctcgtgcatacgtttttcgagcgcgtcgatatcttcctgggtcagggtatggtccagatcgacatcatagtagaaaccgttgtcgacaaccgggccgatcgccatcttggtatttggccacagctgtttaatcgcgtgccccaaaaggtgcgcacaggagtgacgaataatctcaagtccatcttcatctttcgcggtgatgatagagagcgtcgcgtcgttttcaattaagtcgcaggcgtcaaccagttcgccgttgacgcggccggcgatggtggctttcgccagaccggggccaatatccagagcgacgtccatcgggctcacagcgtgatcaaaatggcgttggctgccatcaggaagcgtaattacaggcatttcatgtccttatttgcagtggtgccccgcacgaaagagcacatacaaaacaatataatcataattatcaacacgttcaggcccagttcccgcttcactctgcgaaaatatgtgcacgctcgttcaccgacgcgtacccacctgcagccgcctgttgataacaccgacggttagtttacacatcattagtgcgtgataaaagtcacatgagactaaatggttattgctgatggaaaaaaaaggtcgcggcgcaacaaacccagcgtaattgctgcggaaccgtgcggcaaaagagcgcggcaggacgatatgacgcataaagaatatttatgctttcacatcaattatgcatgtttaacacaaagtgcggaaagcaaaaccggtacggcattacccggtttgctgcttcacgaaataattaaaggatgatgttcaagaacaatgaaatatcaggaccattcgccggcgacaagtttatgaacatcaaaagcatcattcattgactgcccggtagactgtgagcccggcgctatgttggagcctgcttcgacatcggtagctttggcgataccaacttgggtatgctcgttattacccggctgcggtgcgggagcggcggcaaatgcgccaaaagacagcgtgcacagcatcacggccgcgagtgcgattttgctatttctcatgatagtcattctcttatttgtttcagataaatagaacggcgtcgttatcgccgcctgtgtgcaacagtatagatccagatcacatttttgtccgacccaatatttatcttttcgtgtcaaattaactgcatatttgtcagcaaaatagcaattgtggggaaattatgaagacgatttctttttataaaaaacaaaacgagagaccaaaaataataatgtcacttattgccaaatttaaaacaatcaggccagaatatctggcctgaaatattacattttataaccgagcgatagcgtggtacggcgatcggtgtgttccggcgccgatgacggcggctcagagttccacgtcaggttataggcgaccttgagggcaaagtgagcattaatggcaacgttcagcgcgctttcggagttcagcgtcgtatcttcagcgccgaataccgaaacaccttgcgtaaatttggcgttatcggtcatctgccaggcgtaagtgccggaagcatagcccaacggctgagtatcagtatcaccgtcggtatactcgtcgtagcgtacgccaggaccaaattcaaaacgcagactgtgcaccggtccgttcataatctgtcgaccataacctgcggtaaacacatcccgctgctgataaccattgtaacgatccgtcagccagctggcctggccaaatatatagttctggtcagtcaggttgtaacgactacgtccccccaccgcgtacctttccgaagagcgctgatcgtttgacgacgtattgctggcattcccccacagcgaccatgcggtggtattgccataccaggtcaacgtggagtcggcggtcattgaggaacttttcgtattgccggactgcgccagataaccggcgttaacagtaccttcgaaaggttttttagcagaagatgggtcatccatgacagtaaaaacggaatcatcggccattgcgcacgcagacgcaaaaagccctcccgcgagcaacgccgctgcgggtactgtcttcaaaagcttcatttaattttaagtccgtacaacctataaggagacctggagggtcccgggagctttcgcgaggatcgcggatagccggtcctaagaaagggagtaaattataaaaaagcacgattaacttagcaatcaattactctttcattttttgtataagacgcttctcaaaacaatttttatttcataaagataaaaagaggttgcgttgtataagtggcccgtcgcttccccttccctcctttaagtgccatgcttaaaaccagagcagctaaattcgtattatggaggaaactggatgaccaaaatctatacgctcacgttagccccctcgctcgatagcgcaacccagaccccgcaaatttacccggaaggcaaactgcgctgtagcgctcccgtgtttgaacccggcggcggcggaattaacgttgcgcgagccatcacttttcttggcggcagcgccacagccatctttcccgtcggcggggcgacaggcgaacacctgacggcgctgctgacggatgaacatgttcccgtcgatacggtagagacccatgactggacgcggcagaatcttcacgtgcatgtgaacgccagcggcgagcaatatcgtttcgtgatgccgggcgcagcgttaactaaggaggagctccggctccttgaggaaaaggtcctcgccatcgccccgggttccctgctggtgattagcggaagtctcccgcccggcatcagcgtcgataacctgacgcagctggtcaaaaacgctcagcagcatggattgcgctgtattgttgatagttccggtgacgcgctcgccgcagcgcttgatgtcggcaatatcgagctggttaagccgaaccagaaagagcttagcgcgctggtacagcgcgatctgagccagccggatgatgtgcgtcttgcggcgcaggagctcattcggtcgggcaaagtccagcgcgtcgtcgtctccctcggtgcccagggtgcgctcggcgttgatgcccagggtagcgttcaggtggtaccgccgccgatgaaaagccagagcaccgtcggcgccggtgacagtatggtcggcgcaatgaccttaaggctggcggaaaacgcctcgcttgaagatatggttcgctttggcgttgcggcgggtagtgcggcaaccatcaatcagggcacccgcctttgctcgctggataatacgcaaaaaatctacaactatctgcgcggttgataacgccttcgctccctctgggaagacagagggagtcgccaaatcagcatgatggtctatgctaaaaatgccatggataacaacggggtgaaaaatgagtagcgaaattattgcctgggtcgtcacggttcgttttcacgaagagacgttaacggaaattaacgaactcagtaatcacctcacccgcgccggatttaccctcgtcttaaacgatgatgaagggaacgtccacgagctcggcaccaacaccttcggcctgctttctatgcagaatgccgaggaagtcaacgccttaagcgcaggtttagccgaaaccgcgctgggaagacccgtcgacgtcaccgtggtcacattcagcgagtggttaaaagctcaataagtgcgattgacgcaacggaaaacgtccagttgtgcgtcagttcgagttttacgccgggtttatgcgctaaccttatgaaatgttggaaaacatggggagagacggcatgtggcaagctatcagcaatttgttacgcgatttgcataccgaagcagctgaaatcgaactgcgaaacgaactacccggtggagagatacacgcggcctggcatttacgctatggcgggcgagattacttcgtaaaatgcgacgaacgcgagcttttacccatcttcacggccgaggcagaccagcttgaactactgtcgcgcagtaaaacggtgaacgtaccgcaggtttttgccgtgggcagcgatcgagattacagctttctggtgatggaatacctccctcctcgcccgctggatgcgcacaacgctttcctgttaggccagcaaattgcccatttacatcagtggagcgaccaacctcagtttggtctggattttgacaacgacctctccaccaccccccagccgaacgcctggcagcgtcgctggtccacgttctttgccgaacagcgcatcggctggcagctggaactcgccgccgagaaaggcctgcattttggtgatatcgatcatcttgttgatattgttcagcaacggctgagcagtcatcagccgcagccgtcgctgcttcacggtgacttatggtccggtaactgcgcgctcgggccaaacgggccctatattttcgaccctgcctgctactggggcgatcgcgaatgcgatttggcgatgctcccgctgcatccggaacagccgccgcaaatctatgacggctatcagtccgtatcgccgctgccgtccggctttctcgagcggcagcccatctaccagctctatacgctgctgaatcgggcaattctgtttggcggacagcatctggtgacggcgcagaaagcgcttgatgaggtgttcatggataaggccccgtaaggggccttgtttttgagggttagctaatttgtacgcctttcagacggaactgaatggtcatggtaatgccggttcccggtttgcccggttcatagcgccatttacgtaaagcgtttttcacttcacgctcaaacatattggcaggctgggcggagaggatctgtacgttgtccacgcgcccgtccggcgtgacgtcaaacttaacccgcacggttccttcaaggcgcagcgcctgggcacgattcggatagatcggctctccgcggcttagcgcccgcggcccggaaggcaccgtcacggtgggtttagcggtcgcggctgaggtgctcggcgcggtgcgcgccggcgccgtatttgtattttcaaacggcgaggccgggcgcgtttccgccggttttacatcacgcttcggttgttcgacctttttttccggcttcggtttaggctttggcttcggttttggctttggtttatggataacaaccggcgcctcttttggcggttcaggcatcacttccggttccggttctggctccggttcaacaacgggctcaacgaccggctgagccgcctgaggcggttccagatctgccggggtcaccatagtgatttcaatgggctgtgagggtgccggccgttcaataacctgatgtaccgaagtatagagcaaccccgcgataacactgccgtggataaccacagacagtagcgtaggccacggaaagcggcgaggtaaatcaaaggtcattgcgctcatagtcgtttctgttgaaaaatgatgccccgattttaaatgcaaatagcaatcatattcaactagggttgttggcttgtatcaaaatttgccctgttttctgacaaaaagctcccgggacgtggcattctggggatcgtgatcatctttgcattgcagtcaacgacggtttcacttaacgtgattcgccaatttattgataaggagccatgccgtgctttacgttatctacgctgaagatatcgccgactctctggaaaaacggacatcggtacgtcccgcccatctggcgcgtttgcaattattacatgatgaaggtcgtttactgaccgccggcccaatgcctgccgtagacagtaatgaacccggcgcggcgggcttcaccggctcaacggtcattgcggaatttgaatcgctggaagcggcgcaatcatgggccaatgacgatccctatatcgccgcaggggtttatcagaaagtctcggtgaaaccgtataaaaaagtgttttagcctataaaatgcttaagcaataagaatgcggttaaaatttaatctatggcgatcgttcattagaggacgtttctaagtacgcgagtacggaatggtcgccatccttatgtctctccacttccccggttctgcattccgttctctttaggacgcgccctgatgatagccgtttgccgacagtgcatcagcaccgccgactttctatggttaattacctgttggacttcagcgttcccttaagaccatgcggttctgagcgaagatactgcggcggaacgctcacctgagcgcccagggctgccgcggcatgccatggccagtgcggattgtagagcacggcgcgggcaatggcgatgaggtcgacgtcgccattttgtagcgcctcttccgcctgctgcgcttccgtcaccagacccacaccgatcaccgggatattcaccttctcgcggatttcacgcgcgaacggcagctgatagccgggccccacctgaatcgcctgatgaggcgacagcccgccgctggaaacatgaatatagtcgcagccaagcgcctcaagctgctggctgaagataatcgattgtgcgttatcccagccgccatccacccagtctgttgctgaaagtcggacgcccaccgcgatgtcctgactgacggcctcacggatggcccggaatatctcgagcggaaaacgcaaacggttctccagcgagccgccgtattcgtcggtacgctggttactgagcggtgaaaggaactggtgcaacaggtaaccatgcgcggcatgcagttcaatcaattcaatacccatccgctcagcgcgtctggcgctgtctacgaatgactgcttgatgcgtttcatgtggtcctgagtaagttcaaccggcggtcgttcaccttcaccataggccagcgctgatggcgcaaccgtgtcccatccgccagaatcatgcgccagctggtgtccccccagccagggggctgcggaagaggcttttcgtccggcatggcccagctggataccgatggggattgaagcgtactggcggatatcgttcagcacggtgcgtaatgcggcttccgtttcgtcattccataagcccaaatcagccggggtaatgcgtccggcgggctctacagcgctggcttcgataatcagtaagcccgcgccggaaaaggccagctgtccgagatggatacgatgccatgccgtcgccttgccattgtcggcggagtactggcacattggcgcaatgacaatacggttctcaagttccagcttaccgattcgcaccggactaaaaagttgactcatagatacctctcaataatagaagccttacggacattataagtagcatgtgctgatgcatggcacttcccgttttttgcgtttatacgcgttgggccagtcttatgaggtatggcgcgatgcgacttcctgcccgccgctgctgatgcaaacaataacgcaggagcccgcgagaaaccgggtttcgccggcagaaggaagagagatgacagtataaggatgtatgctaagaacgaaacgctgataaaacagaggcaccgcgagcggtgccttttgtttcgactctcaacattcagagaaggtgaacagcagagagtgacgttgccgtttaaccagctcctttctgatggagaggatgcgcatattacgacgcgactggccttccagccagcgtgctttacggcgactcacctgccgaagcatgcgccagcgccctacttccgttctactacgcttcattgcaactactctacaagtaaaaacagcctgcattatagaccgatgaatctggctaaccaacgctttcgctgcgtttttatttgccagatagatgatgatgcgtaaactcatgtcatcaagtcattcaaaaggatttttcatctatgacaaccttttacacggtggtgaactggctggttatactcggttactggctacttatcgccggtgtaacattacggatattaatgaaaaggcgcgcggtcccgtcagcgatggcatggctgcttgtcatttatattcttcccctggtgggcattatcgcctatctctcgtttggcgaactgcatctgggtaaacgccgcgccgaacgcgcgcgggccatgtggccctcaacggccaagtggttaaaggacctcaaagcctgcaagcatatctttgccgaggagaatagtccggtcgcggaatccttgttcaagctctgcgaacgtcggcagggcattggcggcgtcaaaggcaatcagctccagctgctcaccgaatccgacgacgtcatgcaggcgctcatccgcgatatccagctcgctcgtcacaatattgagatggtgttctatatctggcagcccggcggcatggccgatcaggtcgccgagtcattgatggcggcggcaaggcgcggcgtacactgccggctgatgctcgactccgcggggagcgtggcgtttttccgtagtccctgggccgccatgatgcgtaatgccggcattgaagtcgtcgaagctctgaaggtcaacctgatgcgcgtctttctgcgccgtatggacctgcgtcagcatcgtaaaatggtcatgatcgataactatattgcctataccggcagtatgaatctggtcgacccgcgtttctttaagcaggactccggcgttggccagtggatcgatctgatggcgcgaatggaaggtccggtagcgacagcgatgggcattgtctactcctgcgactgggagattgaaaccggcaaacgtattttaccgccgccgccggacgcgaacattatgccgttcgaagaggccagcgggcacacaattcacactatcgcctcgggtccgggttttccggaagatttgatccatcaggctctgttgactgccgcctacgcggccaaagagcatttgatcatgacgaccccctactttgtgcccagcgacgaccttttgcatgccatctgtaccgccgcccagcgcggcgtcgatgtcagcatcatcctgccgcgcaagaacgattcgctgctggtgggctgggccagtcgcgccttctttaccgaactgctggctgccggggtgaagatttaccagtttgaaggcggtctgctgcatactaagagcgtgctggttgacggcgaacttagccttgtgggtaccgttaacctcgatatgcgcagcctgtggctcaacttcgagattacgctggtgattgacgatgccggatttggcagcgatctggccgcggtgcaggacgattacatctcccgctcgcgcctgctggacgccaggctgtggttaaaacgtccgctgtggcagcggatcgccgagcgactgttttacttcttcagtccgttgctgtaaaacgtgccaatcagatgtttaatgggtagcaatcatggatatggatttaaacaatcgcctgaccgaagacgaaacgcttgaacaggcttacgacattttcctcgaactggccgtcgacaacctcgatccggcggatgtcattctgttcaacctgcagtttgaagaacgcggcggcgccgagctcttcgatccggcgcctgactgggaagagcacgtcgattttgacctcaaccctgacttcttcgctgaagtggtcattggtctggccgatgaagatggcggcgaaattaacgatatttttgcgcgcgtgctgctgtgccgtgaaaaagaccacaagctctgtcatattctgtggcgcgaataagctctttcttaagtaaatagcttatatataaaagaagaagcctgcctgagttaaccagggcaggcttttttggttattcaggcagttcgctgccgcagacgttgcagtagcgagcgtctttttcatgaacgttatgctggcaatgcggacactggcgctgagtccggcgactctgaaatgcggtggtcatatggctggtaattaagccggtggggatcgcaataatcgagtagccaattaagataagaatggaggccaaaattcgccccagcggcgtatgcggcgtaatatcgccataccctaccgtggttatcgtcactatcgcccagtaaaccgacgcgttcagcgtagtaaaaccgtatcgcggcccctcaaccagatacatcagggagccaaagatcaccatgacgatggcaacaaaagaatagaacaggatcagctggtggcgagcgctgacgatagcggcccagaaaatattcaacgacggcataaagcgcagcagcttaaggatacgcaacgcgcgaatagcgcgcatggctcgccaggcaaacacgtactcaatactgatctcgggccacagccacataacgtaaagcggtaaaatggtggccaggtcaataatgccccagaagctgaaaatatactttagcggattcggccagctgataatgcgcagaaaatactcaaaggtaaaaaccgccgtcacgacaagttcgagccagacgaaaatatgccattcgtctaaggtcagatgatattgcgttccgagcccggactcgataaatatcaccagcacgctaagcagggcaaatacgccgcaaagtccctcgaaatgccgaccggatcgtcggttttgatcgaagagtaaatgatacagccgcagacgagcggcatgaatatgaaaagccacgttaacctcgctaaaaaaagggctgactaacgtcagcccctgagattataacgggtccaccttcaggcaggaaaccgcatggcggaaactgccctccagcaccggtcgcgtcttagcgcactccggcccggcaatcgggcatctggtgcggaatacgcatcccgacggcgggttaatcggcgatggcaattccccctccagaagctggatcgttttattcttttccttatcagggtccggaaccggcaccgccgacatcagcgctttggtatagggatgcagcggattatgatacacctcatcataggtgccgagctccacggcatggccaagatacattaccagcacgcgatcggagatatgcttcacgaccgccagatcgtgggcgataaaaatcagcgacagtcccatttcccgctgcagctgctgcagcagattcactacctgcgcctgaatcgacacgtccagcgctgacaccggctcatcgcaaataatgagcttcggttcaagaattagcgcacgggcaataccgatacgctggcactgaccgccggagaattcatgcggatagcggttaatcaggttcggcagcagccccactttcatcatcatcgccttaacgcgatcgcgaacttcctgacgcggcattttgggatgataggtgcgcagcggctcggcgatgatttccccgatagtcatgcgcgggtttagcgacgccagcggatcctgaaagatcatctgaatatcgctgcgcacgtcgcgccactcgtcggccttcatccccagcaaatctctacctaaccaggcgactttaccgtcggtagccttcaccagaccgatgatggcgcgcgcgaaggtcgattttccgcatccggactccccgaccacgcccagcgtttccccttcatacagacgcagcgttacgccatctaccgctttcagcgttttcgacggctgccagaaccactgtttgccgtctttaatatcaaagtgcactttcagatcggcgatttcgagcaggacttttctttgttccgttacggcgttcatagcaaatcccccaccggttgaaagcaggcgcgcaggcggcccggcgcaaactcctccagaggcggagcgctattgcaaatctccatcgcgtgcgggcaacgcggctggaatggacagcctttcggcagacgcagcaggttcggcgggttgcccggaatcgttaacagggcatcgccttctgcgtccaggcgcgggaccgcattgagcaggccaatagaataaggatgagagggatggtagaagacgtcgcgcgcctgaccatattccatcgtgcgtccggcgtacatcaccagcaccttatcgcagatcccggcgacgacgccgagatcgtgggtaatcataatgatcgccgtattgaactcgcgcttgagctcattaagcaatgtcattatttgcgcctgcacggtcacgtccagcgccgttgtcggctcatcggcaatcagcagcttaggccggcacagcagcgccatcgcaatcatgacgcgctggcgcatcccgccggaaaactcgtgcggatacattttcatccgtttgcgcgcctcgggcattttgaccgcatccagcattttcaccgactcttcaaaggcttcggctttgctcagcgctttatgcagcatcaggacttccatcagctgttcgcctacccgcatatacggattaagcgacgtcatcgggtcctgaaaaatcattgagatctgctcggcgcgcagcttattcagctcgcgctccgggaggttaaggatctgcttcccgttaaaggtcgctgaccccccgatacggccgttggcggccagcaggcccatcagcgcaaaagcggtttgcgacttaccggaaccggactcgcctacgatgcctaaggtttcccccgcccgtagattaaaattgagatcgttgaccgcagtcacatcaccatcgggagtcgcaaaggtgacgcggagatctttcacatccagaagcaatccggattgttgtgctgcctgcggcgctttcgccgtttccatcgtactcatgtcggcgctccttagcggtctttcgggtcgagggcatcacgcaggccatcgccgataaagttaaaacaaaacagcgttaccaccagaaaaccggcaggaaacagcagcagccacggcgatacttccattgagttcgcgccatcgctgagcagcgcgccccagctacttaacggctcctgggtacccaggccgaggaagcttaagaaggattcaaacagaatcatgctcgggaccagcagggaggcgtacaccacgaccacgccaagcacgttaggcacgatatggcggataacgatattgccggttgaaacgccgccgacctgcgcggcttcaataaactcttttcgcttcaggcttagggtctgaccgcgaacgatacgcgccatatccagccaggagaccatcccaatggcaacaaaaatcagcaggatattctggccaaagaaggtcaccagcaggatgacgaagaacataaacggaaaggagttgaggatttccagcaggcgcatcatcactgaatccaccttgccgcccagatagccggaaagcgacccgtaaagcgtccccagaatcaccgccaccagcgctgcagccacgccgaccatcagcgagatacgtccgccgatcgccacccgcaccagcaggtcgcggcccgaagagtcggtcccaaagtagtgtccggactccatatcgggggcgctggacatcatgccccagtcagtatcgtaataggaaaactgcgataccatcggcgcgatggtgacaaagagcgcaatgatcaccagcacaatcaggctggcaaccgcagcacggttatgcataaagcggcggcgggcgtcctgccagaggctgcgcccctcgacttccagcttttcactgaagttttccagcgcctcgttgtttttcttacttaacatcatggcgaaccccagcgttagtaacggatcttcggatcgataacggcatacagcacgtcaacaatcgcattaaacagaatagtcaatgcgccaaccagaatggtcagactgagtaccagcgagtagtcgcggttcagcgcgccgttgacgaacagttgaccaattcccggcaggccataaatggtttcaatgaccatcgagccggtaataatgccgacaaacgcgggccccatataggagagcaccggcagcagcgcgggctttaacgcgtgacgcagaataatgcggcgcatcggtaagccttttgcccgggcggtgcgaatgaagttagagtgcagcacttcgatcatcgaaccgcgggtaatacgcgcgatactggcgatataggccagggatagagccaccatgggcaaaatcatatattgcagcgccccgccgttccatccgccgcccggcagccagtgcagcgtaatggcaaatatcatgaccagtaagggcgcgaccacgaaactcggtatcacaaccccggtcattgccacccccattacggcaaagtcccatttcgtattttgcttcaatgccgcaatcactccggcactcacgccaagcaccaccgcgagaaaaaacgcggcgaagcctaatttggcggacaccgggaagctggacgccaccagatcgttgaccgagtaatctttatatttaaaggaaggaccgaaatcaccgtgcgccagctgcttcagataattgaagtactgggtcatgatggggtcatttaaatggtattttgcttcaatattcgccatgacttctggcggcagcgtgcgttcaccggtaaaggggcttcccggcgcaagacgcatcatgaagaaagagatagtaataagaataaatagcgtcggaatcgcttccagacagcgacgtaagataaattttaacattgcccgtaccttctggcgtgtgccttcaatagtgcgatgaaataagacaccgtgaggcaagcggtaacgcctgcctcacgtattgccattagtgcttcacaatgtacatatttcttgtatacgtattatccagcggatctttgccggtatagccaccgacccacggtttaaccaaacgggcgttgacataatagaagaccggtacgatgacggagtctttatccagctgctgctcagattgcgcgtaaaggtccgcgcgtttcgcgtcatcgctggttttcagcgtttcggcgataatcttgtcgaaagccgggctcttataatgcgaggtattgtttgagctgtcgctcagcatcgtattaaggaaggaggtcggttcgttgtagtccgcacaccagccggcgcgcgcaacatcaaaggtgccctgatggcgattatcgaggaaggttttccattcctgattttccagcttcacgtttacgccgaggtttttcttccagatagacgccaccgcgatagccagttttttgtgcagatcggacgtgttatagagcagattgaaagtcagcggcttatcagcgctatagccagcttcggccagcaattttttcgcttcttcattacgtttttcctgcgaccacttgaaccattcaggctcaatcagcttcatgccatcggtgtacggcggcgtatagctgtaggctggcaggtcgccctgattcttcaccttattgacaataatgtcgcgatccagcgccatcttcagcgcagtacgcacgcgaacgtcggtaaacggcgctttctggttattgatttcgtaataataagtgcacagatacggatcgacgtgaacttctttcgggatctcttttttcagtttctggaacagttcgatcggcatgttgttataggtcatatcgatttcgccgctgcggtagcggttgacgtcggtgacttcagaagaaatcggcaggaaggtgacctgattaatcacggttttggcgttatcccagtagttggtattacgctccagaacaatgcgttcgttaacaacccaatcttttaatttatacgcaccattgctgacgatattggccggctgggtccatttgtcaccaaatttctcaatagcggatttaggtacgggtgaaacggatgggtgaacgagcagtttgtagaaatacggcaccggctcgctgagggtcacttcaaaggtatgatcgtccagcgcttttacgcccagatcggtcgcgggttttttcccggcgataatgtcatcaacgttggctaaatggccatactgcagatagcttgcataaggagacgcggttttcggatccgccagacgctgccagctataaacgaaatcttgtgccgtgaccggcgtgccgtcggaccactttgcatctttacgcagatggaaggtccagactttaaaatccttgttgtcccatttttccgcaacgcccgcgaccggatggccgtcgaggtcgctcaccagcagcccttcaaacaaatcgcggttaatattggactccggcacgccttcaattttgtgcggatcgagagactgcacttcggagccattgttacgtaccagcgtttgtttgtccgccagctgtacccctgccggtacatctgccgcaacggcggcgttgatggtcattaacgcagagaggactcctgcggcaaccaggctttttttcgtgatgatggtcatgtgtttgttactccaatcattataattactggctatttaaccagcctgttttctcttttctggattctgaacagtgcaggagtttatgctgctgtcagagagtactgcttgctatcaccgacttatttattacgaccgctcaaacggcagccttgacgtcgattcttgcccccctgtccgggggcgatgtagtcccgatgggctatataataaaaattctcatttgcgtacatattccgctaaagatcacgccggaaagtaccaaaacgctttattgtccgccaatgcaatttgcaaatatgtgaccggattctcttttgtggccttctggcggcgaagatttatcacccctcgcgcatgccagaaatgattaatattctatttatcaatcaattagtataaatatctcgcactatgtgccctgcatcgccgaatagatgcttttttgtacgaaaaattaacaatcgcttattatttagcacattcatctgcttcatgagtgaaattactaatatcatttcaattatcggacggcaagcaccagagaatggtgtgaggaaaataacagtgattaatgtgggtaaaaggtcgcgctcgtggcaaatgaaatggataacttattgataataaataacaatatcaaaacattagaaaatagtatcgcaggtcgataaatcactttttttgatatgttttgctgataatgagcaaacgcggaacacgttgttccgcgcggcaacacaggttaattcacgaggccaggaaagagcgcctttattccggtaacgatgaactcgatgccgagagccatcagcaacagccccataatacgggtaatcacgttaatgccggtttgcccaagcaggcgaaccagccagggggccatacggaaaatgccccagcagcacagcgcgaaaagcgcaatcgcaactgaaaatcccacaaaatgggcgatgctatggtaacgcgtgccccagacaatggttgaactgatggccccgggtcccgccatcaggggaagcgccagcggcacgacgccgatactttcacgaatggccgtttctgatttttcttgcttgttctgtttatcctcgccgagcttgccgctgatcatcgacatggcgatggtgaccaccagaatcccacccgcaatacggaaggagtcaatggaaataccgaagatctggaggatcgcatcgcctaaaaacagcgacgtgagcaagataatggcgaccgacaggttggctgtcaggttggttttattacgcaccgccgccgtctggtagctggtcatactgataaaaaccgggataatgccaaccgggtttaccagcgcaaatagcccaatgaaaaatttaaagtaggctgaaaaatcaaacaatgattgaatcacagggtgctccgcagcatcattaaaaatggctgttgacagttaccggcataaaatatccgcgagaagatacgctgtttgaaagcataattcatccctgttgacgcataagtgcataatttaagctcggatgttagttatttgtttctgcaatgctatttaagtctttaattagcataccgtatcattacgcttgatcaaacaggtcaaaaaatgaactgctgaaaggtatcagcttggctgattattgatttagatcacataaattgtactcagaagtgagtaaccttgtttacacacagaagaggaggcaaagcagcggtacctgaaagaaaaacaaaagcttttttagtcaatcggtgaagtcagaagcacaaaattctttacgttaacatttaaatgcaagccgttaacacactgtctatactgtcgaatcgagctactgattcactaaaaaagtttaacattatcaggagagcattatggctgttactaatgtcgctgaacttaacgcactcgtcgagcgcgtaaaaaaagcccagcgtgaatatgccagtttcactcaagaacaagtagacaaaatcttccgcgccgccgctctggccgctgcagatgctcgaatccctctcgccaagatggccgttgccgaatccggcatgggcatcgtcgaagataaagtgatcaaaaaccactttgcttccgaatacatttataacgcctataaagatgaaaagacctgcggcgtcctgtctgaagatgacaccttcggtaccatcaccatcgctgagccgattggtattatctgcggtatcgtcccgaccactaacccaacttcaaccgctatctttaaatctctgattagcctgaagacccgtaacgccatcatcttctctccgcatccgcgtgctaaagatgcgaccaacaaagcggctgatatcgtactgcaggcagctatcgcagccggtgcgccgaaagatctgattggttggattgaccagccttccgttgaactgtcaaatgcgctgatgcaccatccggatatcaacctgatccttgcgaccggcggtccgggcatggttaaggcggcgtatagctccggtaaacctgccatcggcgtaggcgcaggtaacacgcctgttgttatcgatgaaacggctgatatcaagcgtgccgttgcttccgtcctgatgtctaaaaccttcgataacggcgttatctgtgcttctgagcaatccgttgtggttgtagattccgtatacgatgccgttcgcgaacgtttctccagccacggcggctatctgctgcagggccaggagctgaaggctgttcagaatatcatcctgaaaaacggcgccctgaacgctgcaatcgtaggtcaaccggcgtataaaatcgctgaactggccggcttcaccgtccctgtttccaccaaaattctgattggtgaagtcaccgacgttgatgaaagcgaaccgtttgcccacgaaaaactgtctccgacgctggcaatgtaccgtgcgaagaacttcgaagacgcggttgataaagctgaaaaactggtggcaatgggcggtatcggtcatacctcttgcctgtataccgaccaggacaaccagccagaacgcgttgcttacttcggtcagctgatgaaaaccgcacgtatcctgatcaacacccctgcttctcagggtggtatcggtgacctgtacaacttcaaactcgcaccttccctgactctgggttgtggttcatggggtggtaactccatctctgaaaacgttggtcctaagcacctgatcaacaagaaaaccgttgctaagcgagctgaaaacatgttgtggcacaaacttccgaaatctatctacttccgtcgtggctcactgccaatcgcgctggatgaagtgattactgatggtcacaaacgcgcgctgatcgtgaccgaccgcttcctgttcaacaacggctatgctgaccagatcacctctgtgctgaaagcggctggcgttgaaaccgaagttttctttgaagtggaagctgacccgacgctgaccatcgttcgtaaaggcgctgagctggcgaactccttcaaaccagacgtgattatcgcgctgggcggcggttccccgatggatgcggcgaaaatcatgtgggttatgtacgagcacccggaaacccacttcgaagaactggcgctgcgctttatggatatccgtaaacgtatctacaagttcccgaaaatgggcgtgaaagccaaaatggtcgccatcaccacgacttccggtaccggttctgaagttacgccgttcgccgttgttaccgatgatgcaaccggtcagaaatacccgctggcagactatgccctgactccggatatggcgattgttgatgccaacctggtcatggaaatgccgaagtcactgtgtgctttcggtggtctggatgcggtgactcatgccctggaagcttacgtttccgtactggcttccgagttctctgacggccaggcgctgcaggctctgaaactgctgaaagaaaacctgccagcgtcctaccacgaaggttctaagaacccggtagcgcgtgagcgtgtgcacagtgctgcgaccatcgccggtatcgcgtttgcgaacgccttcctcggggtatgtcactcaatggcgcacaagctgggctctcagttccacattcctcacggtctggcgaacgccctgctgatcagcaacgttattcgctataacgcgaacgacaacccgactaaacagacagcattcagccagtacgaccgcccgcaggcacgtcgtcgctacgctgaaatcgcggaccatctgggtctgactgcaccgggtgaccgtaccgcagcgaaaatcgaaaaactgcttggctggttggacgaaatcaaagctgagctgggtattcctaagtctatccgcgaagctggcgtgcaggaagctgatttcctggcccacgttgacaagctgtctgaagacgcatttgacgaccagtgcaccggcgctaacccgcgctacccgctgatcgctgagctgaaacagattctgctggatacgttctacggacgtaattacgttgaaggcagcgtggaagagaaaaaagaagtcgcgccggctaaagctgagaagaaagcgaaaaaatccgcttaattccacagccgtaaagtcagtaacgctgagccccatcttttgatggggcttttttgtctctgtcgttcagcagccggcaaaacgcctcagacagccgaaacgtataatcaagggccaaaggcttagtaaatgaaaaaaggcgctgtaaaagcgcctgagacgatttaaagggtgggtattagcagctgcgctgtttgttctgcaccgcggtcagagagccttcgctcagcgcctctttataatgtttacggcatacggatacatagcgctcattaccgccaatcaccacctgttccccctcattgtagggccggccttcctgatcgaggcgcaaaaccatactcgccttacggccgcagaaacagatagtttttaattcaaccagcttatcggaccacgcgagcaaatattgactgcccgtaaatagttcgccgcgaaaatccgtccgcaatccatagcacaatacgggaatatcgagctggtccaccacctcggacagctcgcgcacctgctcccgggttaagaactggctctcatcaactaatacgcagtggatgggttgacgcttatgttcgtctgcaatgtcggcaaataacgcagtttgggtattatacaaccgcgccggcgatgagagaccgatcctcgaactcactttccctgaaccaaagcggtcatcaatctctgccgtataaaccaccgtgcgcatccctcgctcctggtaattgtatgatgactgcaacagagcggtggacttgcctgcgttcattgctgaatagtagaaataaagttgtgccatcggccgcgtaaccccaatcaatgtgttttttagcagtaaaattgtatcatatattcacacgctatcagccctcgccgtgcgggtattgccgggaacgttcactcggcggagacctgaaagattaagcctgttaattgaatggtaatgcctgctattcgtacgaccaggcggtcacgcagacgtcactattgcccttttgtgcttatcagccattttcggatagctataaccgcgctggacaagtgttttatattaaacatcatcgtcgctgctgcgctaatacccacaatgatatttatccatgcaaagtataatttttcccactgcgcatcggaaaaagcatactatctcagggttttagcttatcctctccatcatcctataagcgaaaaagatgtgaacccgcacataaaatttaagttaaatgaattaattcccgagacaaataacaagttattttgacttccttacattctcccctattgcacatctgaatttatcgctctattattagtccaacaaaccaccccacaatataagtttgagattactacaatgagcgaagcacttaaaattttgaacaacatccgtactcttcgtgcgcaggcaagagaatgcacccttgaaacgctcgaagaaatgctggaaaaattagaagttgtcgttaacgaacgtcgtgaagaagaaagcgctgcggctgcggaaattgaagaacgcactcgtaaactgcagcaataccgtgaaatgctgatcgctgacggtattgatcctaatgaactgctgagcaccatggcggcagttaaagcgggaactaaaaccaagcgcgctgcacgtccggctaaatacagctacgttgacgaaaatggcgaaactaaaacctggactggtcagggtcgtactccggcagtgatcaagaaagcgatggatgagcaaggtaaatctctggacgatttcctgctgtaataagctatcgtgtccgtttaaaaatcccgctgcggcgggattttttttatccgttattcgggaccggttccgggcgggcataaaaaaaccgggaaacgaatctcgctcccggtttcgcattctaccgcgtacgattacttcgctacggctttatccagccaggctttaaattcagcgcccagggacttgtggcgtacgccatattcaacaaaagcctgcatataacccagcttattaccgcagtcgtggctcttgcctttcatatgataggcttctaccgtttctttttcgatcagcatatcgatggcgtcggtcagctgaatctcatcgccggctcccggaggggttttcgccagcagtggccaaatatccgcgctcagcacgtaacgaccgacaaccgccagattagaaggcgctacgtccgctttcggtttctcgacgacaccaaccatcggtacgctctcacccggctgcagggccaggcccttgcaatcgacaacgccgtatgcggtaacgtcagcaaccggttcaaccatgatctggcttgcgccggtctcatcgaaacgagcgatcatttcggccaggttgtcgcgagacagatcggattcatattcatcaaggataacgtccggtaaaataaccgcaaccggctcatcacccactaccgggtgcgcgcacagcacagcgtggcccagacctttagccagcccctgacggacttgcataatagtcacgtgcggcggacaaatagattggacttcttccagcagctggcgttttacgcgtttttccagcatcgcttccagttcaaaactggtatcgaaatggttttcaatcgagtttttcgaagagtgcgtaaccagaacaatttcggtaatcccggcggcaatacattcgttaacaacatattgaattaatggcttatctaccagcggcagcatttctttcggaatagccttagtagcgggcagcatcctggtgcctaatcccgcaaccgggatgacagcttttcttacttttgaattaagcgcagccattgaaatctcctggactgttcgttttttaaacttctcgttaataatatggtatcgagtatatcagcctgctcagtcaaagctgttccgaaaaggattagatatcttcgaattaggaattttacgcattaaacccggcgatagtaccaccacaaaagatcgcgtggtaatcccacgagcctaaaaataagcacaattgttcactccgtggtcaacatcaggcgtaaacgtccgccagccccccaaatttggcactgccatgatgcgcagcgttgactaatttggttgaggtatgcattacctaaagtacctaacggaacgccattactaatctgaatttgatgttctcccgtattcaaggtgccattcaaacccgcggagactaaaattaaatttttcaaaccgctgtggtaataccctaccaataatgggaattgcccgggtaagtttgcctgccgcagcaattggttaacctgttttagcaggctgcccatctccggcaaacgctgcccctgatgagcgagctgctcctgcagtaacccattaaacagcgcgcgcagcaatagggccgccagaacgccattatcacctgctcgtgtgacatccagacaataaaacgccagatcgttttctgatagcggcgcaatatcgagcacgagtcctggcttatcgacagagacaagctggcgatagtgaatacggcaacgcgacatctcctgctgcaccggcggctggagctcctgaagcagcctcgacgccgcgctaggatcgcttaccagcgcatcccagtcctcaaacaggcgctcttcttcttcgacacgcgaattaaacatattgggatagaggcaggcatacacggtttctcgcaggcgatcgaaatccttaaccggtttgagcaggatatcctgaacgcccaggcgcaacgctttggcgatgtccgccatattttccgtcgctgaaatcatcagaatcggcaactgctcgccctggttacgcacatgttctaccagctgcaggccgttcattcgcggcatggagatatcgcaaatcatcaaatcgggttttgactccgccattttttgcagtgcatccataccatcttccgcctgtacgatggtcgcaccaagcgaagctaaccaggtgtgcataagagagcggaaaacgggttcgtcttcaactatcagaatctgttttcccgccaatggctgcgtcatgatctctcccctgactgacgataatttaatagtggcatgatattcacgctaccgcctgtcagaatttacttaagtatgcatcaaatgcgctccacgggggtacgcactaaaggtaatagttcatccattttcttttccactgccagatgtccggcggcgatagcttcgctggcccggtggaaatcaagcgtggagatttgtggacaaaagggctgaatcaggatatcaggcgggtcgcccgccatacggtttcgcttaaggcgattctccagaacctgaattgacgtcgacatgatttccatcgccgttggcgccctcgtcgcccgacgtgacgtcatacgcgccaggcgagtgcgcagccgcgaatgccacgaaaaatcttcctcgctctccggacgaggcacctccattgacagcaaatcctgctgcatcagatgcgcatcgtgctgcaaatcaacggcaatgacgatatccgcgcccatggcgcgagccagagacaccggcacggggttaaccaccgcgccatccaccagccagtagccattatgcatcaccggcgccatcaaacccggcatactgcaggacgcacggatcgccagatgcagatccccttccgtaaaccacagttcacgaccggtgcttaaattcgttgtgaccgccgcgaacggacgttcgcagcgctcgatctcgctgacgggcatgagtttgcggtattgactaaacacgcgctcgccccgcagcaggccaccccgttgccaggagagatccattaacttcagtacatcccagttactaaaggagcatacccatttctccagggccggaagccgattgcaggcgtacgccgctccgaccagcgagccaatggagcaccctgcgataacatcgacgtcgatacccgtccgccgtaaggcattaatcacgccgatatgcgaccacccgcgagcggcgccagcccctaacgccaggccaattttaagctttctcatgagtaccgaaacatatccttccactccgggcatggcatcatcgccatacctcagttaacataatgcgctttggcggcgtagcgccgtctttctttttcctgtggaggccgttttgtcgccattatgcccctgtggcagcgctctggagtatagctcatgttgtcagccttatctggctggcgcgcagctggcgccagatccgtcacagctgatgcgctcccgctatagcgcgtttgttatgaaagacgccgactatctgattaaaacctggcacccctcctgtcaagcgcagcagtttcgcgcagacctggaaaacggttttacccgcacacagtggcagggtctcaccgtctttgccgccgagacgggcaagaacccggatgaaggctttgtcagctttatcgctcgttacgctgacgataaccgctccggagccattattgaacgatcccgattcttaaaagaaaacggacagtggtattatattgacggcacgcgaccgctaatcggtcgtaacgatccctgcccttgcggttcaggtaaaaaatttaaaaaatgctgcggtcagtaagccagcagcagaaatagcaaacactacaggattttccccgcgatgcattcacaacaacgtaaagtactgcgcactatttgccctgatcagaaaggcctcatcgcgcgtatcactaatatctgctacaagcacgaactgaatatcgtgcagaacaatgagtttgttgaccaccgaaccggccgcttctttatgcgtaccgagctcgagggtattttcaatgattcaatcctgctggcggacctcgacagcgcgctgccggaaggttcaattcgtgaactcaatccagcagggcgccgcagggtcgtcattctggtcaccaaagaggcgcactgcctcggcgatctgctgatgaaagctaactacggcggcctggacgtagaaatcgccgccgtcatcggcaatcacgaaacgctacgctcgctggttgaacggtttgatatccccttccagctggtgagccatgagggtttaactcgcgaagagcatgataaacagatgggcgacgcgatcgccgcccttgagccggattacgttgtgctggcgaaatacatgcgggtcttgaccccagagtttgtctctcgtttcccgaataaaattattaatattcatcactcattcctgccggcttttatcggcgcgcgtccgtatcaccaggcctatgaccgcggggtgaagattattggcgccaccgcacactacgtgaacgataatctggatgaaggcccaatcattatgcaggacgtcattcatgtcgatcatacctacaccgcggaagatatgatgcgcgctggccgcgacgtcgagaaaaacgttctgagccgcgcgctgtatcaggttcttgctcagcgggtatttgtttacggtaaccggacgattattctttaatctcagggaaatgaattgattagctttgcacctttacggataaaaagcaggcaaacagcttcatttccctaaaggaatgctttacaggggcgtctcatttgatatgatgcgccccgcttccagcaggaagctggccagtaaatagcattaccccgtggtggggttcccgagcggccaaagggagcagactgtaaatctgccgtcatcgacttcgaaggttcgaatccttcccccaccaccattctttaccacgttgttgtggtaataccgatgaacgtaaacgatgtttgcacttatcgggaagggtgagaatcttcgaccaaggttcgagtcgagcgaaagcgagacaacgttgccgcaggcaacggcccgaagggtgaggagcgaagcgacgaataatccttcccccaccaccatctctcagcttgacctcaaaatttgaattacccctggtggggttcccgagcggccaaagggagcagactgtaaatctgccgtcatcgacttcgaaggttcgaatccttcccccaccaccatcacttctatgtcgtattgaattcacacttcgctcagtgccccatatccatcccatgcgggaaggatgagaagcttcgactaaggttcgattcgagcggagcgagaaaacgttgccgcaggcaacgacccgaagggcgaggcgcaacgcgccgagtaatccttcccccaccaccatcacttctatgtcgtattgaattcacacttcgctcagtgccccatatccatcccatgcgggaaggatgagaagcttcgactaaggttcgattcgagcggagcgagaaagcgttgccgcaggcaacgacccgaagggcgaggcgcaacgcgccgagtaatccttcccccaccaccatcacttccctgcagtacctcagcaaaatcaaattatcaaaaccgtcttagttagctcttttatttctccagaactgattctgtatttctgccatatgtgccccgccgggagcagaccgcacaaatgaaaaaccctgccgcagcagggtttagctttactcgaaatagaattagcgacgggcgcgaacaatctggtatttgcgcgtcaggtactccaccggcgcgctccagatatgcaccagacgggagaacgggaacagcacaaacagcgtcatgcccagcaccaggtgcacgcggaaaataaacgccacgccgtccaggtgcgaagatgctccgccgtggaaggtcaccaccgactgcgcccagccgaccagcttcatcatttcgctaccgtccatatgctgagcggagaacggaatagtcagcaggcccagggcgcactgcaccatcagcagggagaggatcagaatatccgctccggtggtggtggcgcgcacgcgcgggctcagcagacgacgtttcagcagcagcagaccgcccaccagcgtcatcacgccgcaggcgccgcccgcaatcatcgccatcttctgcttcacgtcgaccggcaggaaggattcgtacatccagtgcggcgtcagcataccgagaaagtgaccggcaaagatccccagaatcccgatatgaaacaggttcgaagccagattcatccctttacggtccagcatctggctggaggccgcacgccaggtatactgcccgtagtcataacgcagccagcttcccaccaggaacaccgtaccggcgatatacggatagatgtcaaagaagaacatattcaggaagtgcattattgctgtcctccgttagagatattcaaatattgcggggcaacggctccggcaaaacgacgctggtgagcggagatctccgactcgccgcagccctgatcggcaaagaatttcacctgttcttcttcccagacggcgtccagcgcctgcggcgtatcgtcgcgggcttcatcggcgattttttccgccactttctggctatcgacctgcgcgttagccagcttgagcagcagctcaaacagcgccgcgtagccgctctcgcgctgctgcaggcgagcgctgagcaggccgagaatcggcgcgacgtcctgcaatccgccgagcgcttccgcttccggcagctgcgccagatactccaggtacagcgggagatgatccggcaattcgcggctatccagctgcagaccgtggcgttcatactgcgccatcaggtcaaccatcgcctggccgcgatcgcgggattcgccgtgcacgtgctcaaacagcagcagcgaggtcgcgcggccgcgatcgaacagttcgctgtagcgagactgcgcgtccagcacatcctgagcggtcaggtcacgcaggaaaacgctcagcttatgggcatcctccggcgcgagcttttccgaagcggcgatagcgtcaaacagctcctgctgatgctgccataaggcagcgtcagggtactcgagaaggcgcgacacaatgacgagttcaatcatgggtgcggctccgttttgctggtgacgtcgatagcatcgatacggcggctgttaaacagattgaactggctgtcagaaccgtggcagccgtcgccgaaggtaaagccgcaaccgtttttctcagggaaggcgtcgcgggcctgctcgcggtggctgctcggcaccacgaaacggtcttcgtagttagcaatagccagatagcgatacatctcctgcgcctgcgcctcagtgaggcctacctcttccagcgcccgggtatccagtacgccgtcgacggtttccgcgcgtttgaagtggcgcatcgccagcatgcgtttcagcgccagcagtaccggctgggtatcgcccgcggtcagcaggttggccagatactgaaccgggatacgcaggctttccacgtccggcagaataccgttgctgcccagttcccctgcgtcggcggccgactgaatcggcgacagcggcggcacgtaccagaccatcggcagggtgcgatattccggatgcagcggcagcgccagcttccagtccatcgccattttgtacaccggcgactgctgggcagcgtcgataacgccctgcggcacgccgtctttcagcgcttgctcaatcactttcgggtcgttcgggttgaggaatacgtccagctgacgctgatacaggtctttctcattctccgtgctggcggcattttcaatggcgtccgcgtcgtacagcagcacgccgaggtagcgaatacgccccacgcaggtttccgagcaaacggtcggcatcccggattcgatacgcgggtagcagaagatgcacttctccgatttcccgctcttccagttgaagtagattttcttgtacggacagccggtgatgcacatacgccagccgcggcacttgtcctggtcgatcagtacgatgccgtcttcttcacgtttgtagatggcgccgctcgggcaggtcgccacgcacgccgggttcaggcagtgctcgcacaggcgcggcagatacatcatgaaggtgttttcgaactggccgtacatcgccttctgcatgttctcaaagttctggtctttggcgcgtttctcgaactcgccgcccagaatttcttcccagtttggaccgctggtgattttttccatccgctggccggtgatcagcgagcgcgggcgggcgatcggctggtgtttgctttccggcgcgttgtgcaggttctggtagtcgtagtcaaacggctcgtagtagtcgtcgatgcccggcagatgcgggttagcaaagattttaccgagcagcatcgcgcggttgcccatgcgcggctgtagcttgccgttgatcttacggatccagccgcccttccacttctcctgattctcccagtcgttcgggaaaccgacgcccggcttactttcaacgttgttgaaccacgcgtactccataccctcgcggctggtccagacgtttttacaggtgaccgagcaggtatggcagccgatgcacttatcgagattcagcaccatgccgacttgtgaacgaattttcattttacgctctcctgtacctggtcgttaccttcgccatctaaccagttaatattcttcatcttacgtaccaccacgaactcatcgcggttcgaccctaccgtgccgtagtagttaaagccgtaggccagctgggcatagccgccgatcatatgggtcggcttcggcgtaatacgggtcacggagttgtggatcccgccgcgctgctcggtgatctcggaacccggcaggtttacgatacgctcctgggcgtggtacatcatggtcatcccggccggcacgcgctggctgaccaccgcgcgggcggtcagcgcgccgttgctgttgaacacctcgatccagtcgttatcctcaatccccagatctttggcgtccgcttcgctcatccacacaatcgggccgccgcgcgacagcgtcagcatcagcaggttgtcgctgtaggtggagtggataccccacttctggtgcggcgtcaggaagttcaacgccttctccgggttgccgttggatttcgcccccatcaccgttttcaccgaacgggtatcaattggcggacgatagaccagcaggctttcgccgaaatcgcgcatccactggtgatcctgatacagctgctggcggccggaaagcgtacgccacgggatcagttcgtgaacgttggtgtagccggcgttataggaaacgtgctcatcttcgagtccggaccaggtcgggctggagataattttgcgcggctgggcctgaatatcgcggaagcggattttttcctcttctttattcgtcgccaggtgcgtatggtcgcgaccggtaaattcgctgagcgccgcccaggctttcaccgccacgtggccgttggtctccggcgccagggtcaggatcatctctgccgcatcaatcgcggtgttaagcatcggctggcctttcgccgggccgtccgctttggtgtagttgagcttgcgcagcagatccatttcgctctgggtattccaggcgatgcctttaccgccgttgccgattttctccatcagcgggccgatagaagtgaagcgttcgtatgtcgccggataatcgcgctcgacggtcagaatatgcggcgcggttttcccaggaatcaggtcacattcgccttttttccagtccttaacgtccagcggctgcgccagttcggcggcggagtcgtgctggataggcagcgtcaccacgtcggtctctttgccgaggtgccccacgcagacttcagagaatttcttcgcgatatctttgtagatatcccagtcgcttttcgattcccaggccgggtcgacggcggctgacagcggatgaataaacggatgcatatccgaggtattcatgtcgtctttttcataccaggtggcggtcggcagcacgatgtcggaatagaggcaggtgctcgacagacggaaatcgagtgtcaccaccagatccagcttgccgtcgagaccgttgtctttccactccacttcttccggcttcacgccgccctgcttaccgagatctttgccctgaataccgttttccgtacccagcaggtacttcagcatgtactcgtggcccttaccggaagagcccagcaggttagaacgccagataaacaggttgcgcggatggtttttaccgttttccggctgctctgcggcaaagcgaatggaaccctctttcagggatttgacggtgtaatcgaccggcgtcatgcccgctttcttcgcctcttccgcgatgcgcagcgggttggtgcccaactgcggcgccgacggcagccagcccatacgctcggcgcgcacgttgaaatcaatcaggtggccgctgtagcgggatttatccgctaacggcgacagcagttcctgcgcggttacggtttcatagcgccactggctggagtggttatagaagtacgacgtgctgttcatatggcgcgccggacgctgccagtcgagagcaaacgccagcggctgccatccggtctgcggacgcagtttttcctggccgacatagtgcgcccagccgccgccgctctgaccgacgcagccgcagaagatcagcatattgataagaccgcgatagttcatatcgaggtggaaccagtggttcagaccggcgccgacaatgatcatcgaacggccgtgggtcttatcggcgttatcggcaaactcccgcgcggtacggataatgtgcgcccgggaaacgccggtgattttctccgcccatgccggggtatacgctttgacgtcgtcgtagctgctggcgcagttttcatcgccaagaccgcgatccagaccgtagttcgccatggtcaggtcgtagacggtggtgaccagcacgctagagccatcggccttctgcaggcgtttgaccggcagtttgtgcagcagcacgttttccagctcgactttattaaagtgctcggtgccttcgccgccaaaatacgggaagccgacgttggcgatatcgtcgtggccgcccagcaggctcaggcgcagctcaacgtcttcaccggttttgccgtcgcgctgttccagattccacttgcctttgtcgccccagcggaagccgatagagccgttcggtacggtgatttcgcccttctcatcaaaggcgacggttttccattccggattcgtttcctgacctaatgcgtccaccagatcagccgcgcgcagcatgcggcccgcggcgtaatagccatcgcgctcttcgagcatcaccagcatcggcatgtcggtgtagcggcgcacgtaatcggtgaaatactggctcggtttgtcgagatggaactcgcgcagcatgacgtggcccatcgccagcgccatcgccgcatcggtaccctgcttcggcgccagccacagatcgcagagcttggcgatttcggcgtagtcgggggtgatggcaacggttttggtacctttgtagcgcacttcggtaaagaagtgggcatccggggtacgggtctgcggtacgttggatccccaggcgataatatagctggagttataccagtcggcggattccggcacgtcggtctgctcgccccaggtctgcggtgacgcaggcggcaggtcgcagtaccagtcgtagaagctcaggcaggtgccgccgatcagcgacagatagcgcgcgccggaggcataggagaccatcgacatcgccggaataggcgagaagcccgccacgcggtccgggccgtaggttttgacggtgtagacgttagaggcggcaatcagctcgttcacttcctgccaggacgaacgcacgaaaccgccgcggccgcgcgcctgcttaaagcttttcgctttgtcggcgtcttcaataatagaggcccaggcatccaccggatcgctgtgctgaactttcgcttcacgccacattttcatcaggcgtttgcgcatcagcggatacttcaggcggttggcgctgtaaagataccaggagtagctggcgccgcgcgggcagccgcgaggctcgtggtttggcatatccggacgggtgcgcggatagtcggtctgctgggtttcccaggtgaccaggccatttttgacataaatcttccagctgcacgaaccggtgcagttgacaccgtgggtggagcgcacaactttatcgtgctgccaacgttgacggtatccatcctcccagtcccggttggtttttagaagctggccgtgcccatcggcaaaggtttcacccttctgtttgaagtagcgaaaccggtccaggaatttactcatcgggtctctcctgtgtggagcctgacggctctctgataaatcgacattgctggatttgcagcgaaggtaacgctatgaaagagggagagaattgataacgatcaagacgatatggcttataaaaacgggttaacacagtaattaccaccaaagtggtatttatttctattttttattttattgattaacaaagatatttttcataaaagcctgcagaaaataaggattagcgattcgccatggtattaaggggtagataccccttaagtcattttttctgtgacttcaggcggcttttaaaattaccccacaccattagtatgttgtaactaagaaataaatactaaaaagggcgcaaataccgttgcgccctttgcagaaactcagaaagaaatattatttctgcttgcgtccgtagactgcccaggtaatcaccacgcaggcgatatagaacaccaggaagaccttcatggcgccggccggtgagccggttaaatccagcgaaataccaaacgcttttggaataaagaagccgccaatcgcgccaatcgccgaaataaagcccagcgccgccgccgtatcggtcgccgcttcacgcatggcctgcgcttcgctgccgccctgcgccttaacgcgatccatggtcattttgcggaagataaccgagatcatctggaaggtagacgcgctgcccagaccggcggtcaggaacagcaccataaataccgcgaagaaggcaataaagttgccgccctcgccgtgggtcggcagcgtcaggaacagcaggccgcagaagatagccataaccacgaagttcaccagcgtcacgcgagtcccgccgaggcggtcggagatcgccccgccggtcgagcgcgccagggcgccgataaacggcccgaagaacgcatagtgcagaatctgcacatccggaaactgggtcttcgacagcatggcgaagcccgccgagaagccgataaacgagccgaaggtggcaagatagagcagcgccataatccacagatgggcgcgcttcagtaccggtagctgctcgctcagcgacgccttcgacgccgacagatcgttcataaagaaccacgccgccagggtgaagataatcaggaacggcacccagatccacgccgcgttttccagatacagcatggaaccgtccggctgctcgctgccggtaccgccaaagacggcgaagatcgacagcgaaaccaccagaggggcaaccagctgcattacgctgacgcccatgttcccgaggccgccgttgatgcccagcgcgccgccctgcttctgcttcggaaagaagaagctgatgttagccatactggaagcaaagttcgcccccgcaaaaccgcagagcagagaaataatcacgaaaacgctgaagggcgtagaggtatcctgtaccgcgaagcctaaccagacgcagggcacgatcatgatcccggtactgaacgcggtccagcgacgtccgccgaacagcggtaccataaacgcgtaaggcacgcgcagcagcgcgccggagagcgccgggagcgcggtcagcataaacaactggtcggtggtaaactgaaagccgactttattcaggttgacggcaacggcgctgaacaacatccagacgcagaatgccagcaaaagacacggaacggagatccacagattgcggctggcgacgcgatgaccgcgctgctgccagaattcaggatcttcgggacgccagtcgctaatgactgaactgttagtcttctccgggattgaagagtgactcatagacacctctaataattcatattaaccctggctaccttatgggttacaggcggcggtaagttgatataaatcaaaggaaaagttggcgctaatttggctaaaaaaaacgcatcacccgaagtgagtagctatttctgcgtaaaaaagtgtggtttttcacgtcagtgctggcattgcccgaacgtctgccaccaatccatcacaccctgacaattaaggggtaatcctttaggggtatgggtatactccaggggatgtccgagaataagcgccactcccggatgatttgccggtcaggagcctcataccccatgttgaaacgtctttttacgccgctaacgctggttaatcaactcgcgttaatcgttctgttagccacggtcatcggcgtcgccggaatggcgatctcttctcgcctggtgcacggcgttcagggcagcgcgcatgcgattaacaaagccggctcgctgcgcatgcagagctaccgcctgctggcggcagtaccgctgggcgaaagcgatcaaaagctgctcgatgaaatgacggcaaccgtttttagcccggaactgcagtacgccgctcgccatgacgatcagcagcgccagcttcaggcgttacagcactactggcagctggagctggcgccggggatgcgcagggcgcaaaatcaggcctcggtcgcgacggatgtcgccggctttgtcgatcgcatcgaccagctggtgaccgctttcgatcacaccactgaggagcggattaaacacgtggtctggatccagcgcatcatggccgtggggatggcgctgctgctggtgtttaccatcgtctggctgcgcgcccgcctgctacgcccgtggaaacagctgctcggcatggcccgagcggtgagccgtcgcgattttacccagcgcgcgcagattagcggacgcaacgagatggcgacgctcggtatggcgctgaacaatatgtctgaagagctggcggagagctattcggtgcttgaacgccgggtgcaggaaaaaaccgccggtctggagcagaaaaacgagatcctcgccttcctgtggcaggccaaccgccgactgcactcgaacgcgccgctctgcgagcgcatttcgcccgttcttaacgggttacaggggctaaccctgctgcgcgatattgaagttcgcgtttacgatatggaagatgaagacaaccatcaggagttttcctgccactccgatattcagtgcgacgacagaggctgctatctgtgtccgcgcgatctgccgccgctgccggataccggcaccaccttaaaatggcggctgtcggatgcccataatcagtacggtattttgctggccaccctgcccgccgggcggcatctgagccacgatcagcagcagctggtggatacgctggttgaacaactcaccggcaccctcgccctcgatcgccatcaggagcgccagcagcagcttatcgtgatggaggagcgcgccactatcgcccgcgagctccacgactccatcgcccagtcgctctcctgtatgaaaatgcaggttagctgcctgcagatgcagggcgacgatctgccggaagcgagccgccagctgctggggcaaatccgtaatgaactcaatacctcctgggcccagctgcgcgaactgctgacaaccttccggctacagctcaccgaaccggggctgcgcccggcgctggaggccagctgccgggaatacagcgcccacttcggtttcacggtacgcctggattatcagctgccgccgcgttttgttccatcgcatcaggccattcatctgctgcaaatcgcccgggaagcgctcagcaacgcgctgaagcacgccaatgccaccgacgtcagcgttaccgtggcgttgcgggacaatcaggtccggctaacggtggccgataacggtcgcggcgtgccggaccatgcggagcgcagcaaccactacggcttgattatcatgcgcgatcgcgcgcagagcctgcgcggggactgtcaggttcggcgtcgggaaaccggcggtaccgaagtggtggtcacttttatccctgaaaaatcgttttcaatccaataaggagaacttcatgagtcaacaggaacgggcaaccatccttctcatcgacgatcacccgatgctgcgcaccggcgtcaaacagctgatcagcatggccccggacatccaggttatcggcgaagccagcaacggcgagcaagggattgcgatggcggaatcattagatcccgatttgattctgctggatctcaatatgccgggcatgaacggtctggaaaccctcgacaagctgcgcgaaaagtcgctttccggccgcgtggtggtatttagcgtttccaatcatgaagaagatgtggtgaccgccctgaaacgcggcgccgacggctacctgctgaaggatatggaaccggaagatctgctgaaggcgctgcagcaggccgcagcaggcgaaatggtgctcagcgaagcgttaaccccggtgctggctgccagcctgcgcgctaatcgcgccacctcggaccgcgacatcagccagctaaccccgcgcgagcgcgatattctcaagctgattgcccagggcctgccgaacaaaatgatcgcccgccgtctggatatcaccgaaagtaccgtcaaagtccacgtcaagcatatgctcaagaaaatgaagctgaaatcgcgcgtggaagcggcggtttgggtccatcaggagcgcgtattttagggcagatgctgccacgacacgccctcggccggtacccgtaccaacggctcagtcagcgccagtgcgatctcattggatgagacgcgctgacccgttttatcctccaccaccagcgaaagatgccagcggttgctcgccccggcttcgctgctccagcgcggcataatcacggtccagccgtccgtactgttcgcctcaattggcgatgtcaggcttagcgcctgggtgtccccctgccagctcagcgacttaatgccgtgcaggctgcgaatctgcagtttcagctgcaccgtctcccccggctgaagatcccagggcggcgtcgccagataaaccgacagcgttttacgctggcgatattcaacgaccggcaggttatcccgttccgggctgtcgtagcggctgccgcgaagcgatcggctaacggcgacttcatcggccgccagctgctgcttcagcgggacgccgaagcgatagttcagcttcagcccgacatcattttggctgacgccgctctcgccctgcttatgcttcgccgtgaccgtcaccagcggaacgggagtgtaattcagccccaccgacaccgcgaccgggttatggtagccggtacccgaatggaacagatcgacgctatcgccaaaatactgctccacgctgacgctggtattaatgtgctgataaaacggcagccgcgcctgggcggtcacatcgtagccgctcgccatacgctgctgctgggtcaggctactcccctgctgccagccgccgagcggctggtagtagttcgccgacaggcgcagcgactcgccccaggcttcggccccgacgctgccgcgcgccatccgatcgtccagggctttatcgtagaaagagttgtagcccagcagccaggagcccatccgccagcgctggccgagaccaatattgccgaccagacccgtatcccgctgggtgaccgagtactgattccaggtaaggtagtcgccgttatcctgcagagggacaaaccagctccctttgctgccggtaaaattgccctctttatccaccagcagatcgacgttggcgttgccccacggcgaaagccagctctccagctggtggctgacctcgttccccagtttaccgatggcaaatactcgcgcctgttcgctggttgtcagcccgttatcgctcatactggcttcgccaaatttcttcgccatctcggcaaagtgctttgcgtcgtcgtcgacctgcggcgccaggccgaggtcgggtaagctctcaggcgcgccggagaacgcctgattatcctgcagcgcgcgggcgggcgcgcctgccagcagcaggagaagcggtaaatacggggttatgcggaacgacaaagagctcaaatcggttacgtctactcacgaagtggtggcggcaaaacctaagtttatcgttttttccccgccctcgcagcctctcgcgcgattccaggaatatgctgaatctcaggcctcaacctgcttcgccgccagcagcgccttaagctccgggagacaggaaccgcagttggtgccgcatttgagtttcgcccccagcgcggcaggcgtacggcagccgctggcaatcgcttcgcctatcgcccgttcgcccacgctaaagcagctgcagataatgcgcccgcgcggcatctcatcgccgccttttctgccgctcaatagtgcatggcgccgggcggcgttctgcggcggggtgcgaaacgcggcgtgaatccactcggcatcgatagccggctcgctggcgtcgctccaccagccgagcatcagctctcccccctgccacgccagcaggttccagacgttgccgccttcggctacctgcatctgccatccctgccgctgacaccagcccacaagccagtcgcgggagcgggtatcccccgccagcgaaagatggataacgccctgcgccgcccgccgccgccagtgcagcgaggcggggagcggaaccggctggcgagcaaaaagctcgcctttccacgccggcagccaggcggctatcgctaccgccgcctgtttactttccggctgcccggagtgcgggtcggtgaccgccctcagcaggttattcacccgtccctggcgagcatactgatcattccagtgcatcggcacaaacagcgacccgggacgctggccagcgctgattgtcacttttgctaccatcaccccattcggtgagcggacccgcgccagttcaccttccagcagctgatagcgcgtcgcgtccgctggcgcgacttccaccaccggttcgctaatatgctgcatcagacgcggcaccgcgccggtgcgggtcatggtgtgccactgatcgcggatccgcccgctgttgaggatcagcggatagaacgcatcggtgaccgcccgagtgggctgtggggtcaccgggaccatgcgcagtttgccgctgcggtgccaccccttgagcaaaccccagcttgcatgactgcggctcaccggccagcgcaccggctccagcgcatcccacgcttcgcggctgagatccgccagtccgccgatgtcaaacgcccgctggccatcgttttcatatcctgaaagcgcggcgtgttcgctgaacacctcgtgcggatgctgccaggcaaaggcggagccgaagcccagcgcctgggccacgcgggcgacgatccaccagtcggctctggcctcccccggcggcggcatgaaagcgcgctggcgtgagatccgccgttcggagttggttaccgtgccgctcttctccccccacgccagcgcgggaaagcggatatgggcaaagcgtccggtatcggtagcggcggcgacgtcggaaacgatgaccagcggacaggccgccagcgcttcgcttaccgcatggctgtccggcagcgacaccaccggattggtgcccataatccacaccgctttcacctcgccgcggccaatggcggcgaacagatccaccgccgtcagccccggcgtttgcgccagacgttcggtcccccagaagcgcgccagacgccgtaaatcatcggtttcaaaattcatatgcgccgccagcatggtcgccagcccacccacctcgcgcccgcccatggcgttaggttgtccggtcagcgaaaaaggcccgcagcccgggcggccaaatttcccgctcgccaggtgaacgttgatgatagcgttgcatttatcgctgccgctggcggattggttaatccccatggtatagagcgtgatggcgcgcggagcggcgataaactcgctatagaaatcggcgacctgctgtcgcggcaggccgcagaactgcgctactttgtcgaggtcccagttccgggcgatagccagcgcctgcggcgcatcgctgaaatcaccgctgatggcgccgctggcggcaatggcgttcagcaggccgacaaacagcccgccgtcgctgccgggagccagcgcaagatgccggtccgcgatatcgcaggtggcggtcctacggggatcaatgaccaccacccgcatctgcggattgtcgcgcttcgcctgcgccagccgctgatagagtaccggatgcgcccaggcggcgttcgacccgaccagcaccaccagatcgctgttttccacgtcctcatagctgcacggcaccacatcagcgcccagcgcccgtttgtagccggtaaccgctgaagacatgcacagccgcgaattggtatcgatatttgccgcgccgataaaccccttcatcagcttattcgccgcgtagtagtcctcggtcagcagctggccggaggcataaaacgccaccgcctgcggcccgtgacggtcgataacctcccgcaggcgcgaacccgccgccgccagcgcctgagtccaggttgcgcgctcgccgtcgacttccgggaagagcaatcttcccgccaggccgacggtttcgcccagcgccgcccccttcacgcacaggcggccaacgtttgccgggtgctgctcatccccgcgtacggtaacctggccatcggcattcaggctggcgataacgccgcagccgactccgcaatagggacacgtggtcctggtttccgtcatcaggaggcctccgcgcgcgccagcagctgctggttgccaacccacactttaccgttctccactttgaccggccaggcgcgtaccgccagttcgccgccgtcgcactggcggccatcgcgcaggcggatacgctgcttatacagaggtgaaatcacgatcggttcgccgcccgcatcgccaagcaggccgcgcgacaaaacgttggcgtcgctgcccggctcgaggttatcgagggcatacacctggtcgccgaagcggaacagcgcaatctgccgctcgccgagcctcgcgccaatccccgcctgctgtggaatagcgtcgagatcgcaaatggcctgccacgggcgggacggcagcgccggttcggcctgcgccgcgaacggggccagctgcggctggccgcgcagggtttgccgctgtacgctttcgtccggctcatcgctgttcacgtaggagcggaacagcgccagccgctgcggatcgttaagggtggtttgccattcgcactggtagctctcgaccacccgcgccatctcctgctccagctcttcgccgatgccgaggctgtcttcgaggatcacgtcgcgcagatagtcgaccccgccctcaaggttatccatccaggtactggtgcgctgcaggcgatccgcggtacgaatgtagaacatcagcaaccgatcaatactgcgaataagggtggcttcatcaagatcgctggcgaacaggtcggcatggcgcggcttcatgccgccgttgccgcaaacgtacaggttccagcccttctccgtggcgataaccccaatatctttcccctgggcttccgcgcattcgcgggtacagccggagacggccattttaattttgtgcggcgcgcgcagccccttgtagcgatgttcgagggtgaccgccaggccggtggaatcctggacgccgtagcggcaccaggtcgaaccgacgcaggatttcaccgtccgcagggatttgccgtaggcgtggccggtttcaaatcccgcctcggccagctcgcgccagattgccgggagctgctccaggcgcgcgccgaacaggtcgatacgctggccgccggtcactttactgtatagctgatagcgtttggcgatctggccgatcgcaatcagcccgtccggcgtcacctctcccgccgccatgcgcggcaccaccgaataggtgccatctttctgaatattggcgaagtagcgatcattggtgtcctgaagcggcagatgcgccggcttcagcagatattcattccagcaggaggccagcaccgaggccaccagaggtttacagacttcacagccgtggccgtgtccatagcgggcaatcagctgttcgaaggtgcggatatggttgacgcgtaccaggtgatagatctcctgccgcgaccacggaaaatgctcgcagatatcctttttgacttcaacgccctgcccggcaagctggtactccatcacctgtttcaccagcgcgctacagccgccgcagccggtcgccgctttagtgcagctttttatcgccgccatatcgcccgcgccgccgctcaccgcctggcagatatcgcctttgctgacgttgtgacaggagcaaatctgcgcgctgtccggcagcgccgctaccccgagcgcttttggcgcgctgccctcacgcgccggaaggatcaggctttccgggtgtttgggtaaagccatcccgttaagcatcatctgtagcagcgtggcatagtcgctggcatccccgaccagcaccccgccgagcagttttttgccctccgcgctgaccacgatttttttgtagatctgctgcggcccatcagtccactgatagctctgacagcccggcgtgcgcccctgggcgtcgccgaacgaggcgacatcgacgcccagcagcttaagcttagtgctcatatccgcgccgctaaagcagcccgcctcacccgccagggtggccgccgcggcccgcgccatctgatagccgggcgccaccagaccataaattttgttctcccacagggcgcattcgccgatcgccagtacgtccgggtcggaggtacggcactggttgtcgatgcatatgccgccgcgttcgcctacgttcagtccgccgctgcgcgccagcgcgtcctgggggcgaatacctgcggagaataccagcatatcagtcgccagcgagctgccgtcagcgaagttcagctgcagcccctgctcattgcgaacaatttccgtcgtcgccttgctggtatgcaccccgacacccagttggctgattttttcccgcagcatcgcagcgccgccgttgtccagctgcaccgccatcaggttcggcgcaaactcgacaacgtgagtttccagccccagctgcttcagcgcgttggccgcttccagcccgagcaggccgccgccgatcaccacaccccgtcgggcggttgcggcgcgggcggcaatctggtcgaggtcgtctagcgtacgataaacaaaacagccctcgagattatgacccggcaccggcggaacaaacgggtaagaccccgtcgccagcaccagcttatcccagtgggtttcgtggccgaaggcatcgcgcaccacccgcgcttcgcggtcgatgctggcgaccgattcgctcaggcgcagctcaataccgtgctgagcgaaaaaatcgccctcaaccagcgacagcgattccgcgctgcgtccggcgaaatattcagtcagatgaacccggtcgtaagcggcatagcgctcctcgcagaacaccacaatccgatactgttgatgaaggtgacggtcgacgcattgctcaagaaaatggtggccgaccataccgtgtccgaccagcactaatacaggttttgtcatcgtagtatgtcccgcagcgcgcggctgcatcgttgaagagggatcgaagagccactctgccggcgccggcgcatgcgcccccagcagagcggtgaggggcgcggcgctgctgcaatcgcccagcagcagtacgccgcgcagcttgccgtcgcgcagcagcaggcgacggtagtggcggtccagcggatcccagctggtatatacgtcatcctgttcggcggcccgcagctcgccggcgctgaagagctcaatgccggtgaccttcaggcgagtgccgctgtcctgccagctgaaatcctcgccaggggtcgcgcacaggcggtccgccagcacctccgcctggcgcagacatggcgccaccagcccccaggtctgaccgtcgatttcacagcactcgccgatggcgctgacgcccggctgcgcggttgccagctggcggtcaacgaggatgccgcgggcgcaggccagcccgctgcgctcggccagccgtttgttcggctgcacgccggtcgccagcaccacccgcgaggcggcaaacgcgcgcccgtcctccagccgcacctgatgttcatcaatggcggcgatacggctctccatcacgcagcgaatcccgcgctcggcaagcagcatttgcagctgctcgccggcaaaagcatcgatttgctgctccatcagcccgcttccgcgatggagtaaagtgacactgtcaccatgacgccgcagcgccgcggcggcctctacgccgagtacgccgccgccaatgaccaccgccgggccgtcgatggccaggatgccctcaacgtccgccagggtgcggaaagcaaaaacgtgcggctgggtgatgcccggcagcggcggcagaaacggcagtgagccggtggcgaacaccagctcatcccagcccagttcgcctgcggtggtttgcagcgtacgggccgcaatatccaccgccgtaaccgtttcaccggcgcgtaccgtcacgttatgccgcggataccatgacgcgggcagcagcagcgtctcgcttgccgctttttcggcgccaagcaccggcgacagctgaatgcggttataggcctggcacggctcatcgccgatgagggtgatgctaaaccgctgcgcatcgcgctccaccagcgcctgcgccaggcgcgtggccgccataccgttgccaataatcaccagttgccgcctcatcgccgccccctatgccgctttcggctgtttttcatagaggaagtgcaggatctgctggcgcagatggtgatagcggctatcgtccgccagctgcacgcgatggcgcggtcgcggcagattgacgtcgaggatctccccgaccgtcgccgccggaccgttggtcatcatcagcacccggtcggaaagcagcaccgcttcatcaacgtcatgggtaatcatgacgatggtggtattcagcgactgctggatctgcatcaccgcgtcctgtaaatgcgcccgcgtcagggcatcaagggcgccaaagggttcatccagcagcagcactttcggtttcatcgccagcgcccgggcaatgccaacgcgctgcttcatgccgccggagatttctcccgggcgcttgtgcagggcgtgccccatctgtacccgctcgaggttgtgctcaatccactctttgcgctcgcctttgctcatgctgcggcgaaagacctgatccaccgccagcgccacgttgtcaaaacaggtcagccacggcagcagggagtggttctgaaacaccaccacgcgttccggccccggcccggcgatttcacggttgtcgcacagcaggccgccttccgtcggcagggctatcccggctatcagattcagcagggttgatttaccgcagccggagtggccgatcaggctgatggtctccccttcgtagatgtcgaaggagacgttctgcaatgccaggaattcgccgctggcggtgttaaaacgctggctgacgccctggacctgaattaatggtttcatctgcgactccctatttttcctgccagctaaaacgacgggcgagcagcatcagcccctgttccagcagcagcccgaccacgccgataatgacgatggcgatgatgatgttttcgacgttgaggttgttccactcgttccagatccagaagccgatccctaagccgccggtgagcatttcggcggcgacaatcaccagccaggcgataccgatggagagacgaaccccggtcagcaccgcgggcaataccgccggaaagaggatcttgcgcatcaccgtccactccgacagctgcagcacccgggcgacgttgaggtaatcttccggaatgcgccgcacgccctcggcggtgttaatgaccatcggccagatcgagcagataaaaatagtccagctggaggcgggttccgctttctggaacagcagcaggccgatgggcagccaggccagcgggctgaccgggcgcagcagcgcgatcagcgggttaaacatgcgggcgaaaaacagcgagcggccaatcaggaagccgagcggaattcccgccagcgcggcaaggccaaatcccaccgccacccgctgcagcgacgccagcacgttccagccgatgcccatatcgttcggcccgtcctgataaaacgggtcggcgaaaagggttagcgcggaatccagcgtgctgagcggcgtcggaaagcctttgctgttcatcgccgccagctgccagcccagcagcagcaatcccagcccgagcagcggcggcagaagacgttgggtgacatcccgcagccagcggctgagcggaggcgtggttttgcgcacctgcagcggcggcagggtaatgacttcgccgggcgcgctgtcggcgccggcctgcggttgcggtttatatgcgtgtttcatctcatgcccccttacgttgaatcgcgaaactgcgggcgtagccttccggatcggccccattccagaccttgccatcgatcagcgtgctgctgcgcatcgcctgcgtcggcgcgctgatgccgccgaccgcctgcgcggcctctttccagacgtcaatccggttaatgcgctgggccaccgccagataatccggtgccgacttcagcaatccccaacggcggaactgggtcaaaaaccacatgccgtccgagagccacggaaaactcacttctccccgttcgtagaagcgcatcgggtgcgcgtcctgccagcggcggccgataccgttgtcgtattcgccgagcatgcgcccgctgaggtactgctctttggtgttcagccacgcgcgtctggcgagaaggcgcgccgtttcgcgggtgttctcggcggatgcgtcaatccagcgctgggcctctatcagcgccgccaccagcgcgcgcgcggtgttgggatgacgctcaacccattcgctgcgggtgccgagtaattttttccggatgctccggccagatatcctgcgaagtggcggcggtgaagccgatacgatcgtttatcgcgcgcgcattccacggttcgccgacgcaaaagccgctcatattgccgatgcgcatgttcattaccatctgcggcggcggcacaacgacggtgcgaatatcgtcaaagggattaattccaccgctcgccagccagtagtagagccacatcgcgtgagtgccggttgggaaggtgtgggcgaaggtgtagctgcccggcgcctgctggtcgatcagttttttcagcccgcccaggtcggtgacgcccttctcctgcagctcgctggagagcgttatcgcctgaccgttgcggttaagggtcatcagattggccatcgcctgcggtttactggcgatccccagctcaaggccgtagagcatgccgtacagaatgtgcgcggcgtccagctccccggcaaccagcttgtcgcgcaccgccgcccagctggcctccttgctcgggacgagggtgatgccgtactttttatcgaatcccttcagggaagcgatggctaagggggcgcagtcggtcagcggaataaaaccgacccgcacggtagtctgttccggcttatccgaccctgccgcccatgccgcctgcatcatgccggggagcagcatcgcgccgcccagcgccgcccccgcctgtaataaacgccgccgtgaaattgaaaacgtatcgcccatacccgctccagaaacgcgcaaaaaaaaagcgtccggcggtgcttacgcaccgctggacgcctttatccttagacatacgtgccgccgttggcccgctgccctaaacctttattcactcgttttatttaatgcaaagccaatgccagatttgcggaggcccggttcacgcgcgttggctcatttgccgggggcgtttgaggcaaaaactgcaccgtcggctggcaacatatgcccactgattgtgcatctactccttaggtggtacttgccatagcgacttcaccgtcagcagcgcgcgggctatctcaaccatgcgctgatttttgtccatcgccattttacgcagcgcctgccaggcctgctcctcctgcattccctggtgggtcatcagcacgcttttggctttttcaatcagcttgcgctcttcaagcgcatcttttaacgacgcgagctgggcggagagctgctgtagctcatgggcctgctggcgcaccagcggcaacagctgcttatccagccgcagggctataccgtcctcctgccagtcggcgggcggcacctggacctcccgatcgtctccctccagcagcgcatcggccgcgttaagcaggtctgcgatcagccgctcttccacgccgcgcagctgctcaagacgctgggtctgaacgcaaaaccagcgcagagccgtttctccctcgtccggcggcggctggcgggtgcaggcgacccgccgcagctgttcaatttccagaccggcctggcactgttcaacaaacagaacggtttgcggcgaactggctaaagcctgaaaagtgtcaaaacagggctgctggccgtcaatgcggtccaccagctgctggcgcagctcatcgctgaactgtccgcgagcaaagcccagcgcgcccagcgcgcgctcctgtccgaccagctctttcccctgcataaagctgtaaagcgcgaccatccgcccggcgatttgcggatcgtcgatactgtcgttgagctgcggaacgatattcaacaggtggcggataatgcggctaaactgcccggtggcctcttctgcggcaatctccaggccgcgcacgcatttacgcaacgcgacaagctgcgtcagataccacaccgcgcaggcaattcgccagcagagcgcgctgctggcggcatcgcgggcaggttccagcgccgcataaaaccgcgtgagctgctcatcaaccagcgccgcgcccgcccggcactccgccgcgtatagtctgccgcccgagcatagccagatatttgacgcgccgcgctcgcactgcagcatatgcaccagcgcgcttatctggcctgccagcgccccctgctgcgccagctggtgcagctgccgcttctgtaagcgacgcgcgcgcgcaaaccagtcgaccacctcaggtgtattacccgccacattattcatacccttcccccgggttaacgctttatacttcagccaagcaataaccgtgccttatagaaggagtccttatgcaacgtattgtgattatcgctaacggtgccgcctacggcagcgaatccctgttcaatagcctgcgtctggctatcgccctgcgcgagcagcagtctgacctcgaactgaaattatttttaatgtctgatgcggtgaccgccggcctgcgcggacagaagccagcggaaggctacaacattcagcagatgctggagatcctcaccgcgcaaaacgtgccggtgaagctgtgtaaaacctgcgctgacggccgggggatcggcgcgctgccgctgattgatggcgtggagattggcaccctcgtcgagctggcgcagtggacgctggcggcggataaagtcctgaccttctaaaaatccgccattcaacgggattaaatattaagctggcggcgtttgttaaccgaaaacaatgtcagctgaatgctttcaggcacaacgtcatttttgtttaatctttattcctttttttgatcaaaatcagcatctgcccccctcccctttggtgttatgcacagagcaaagtgtgaacaatatcacgcgggttaatgggctggcaggatgctgtagacagaaacggggtcgagattaaatggcaatggtaaaagcaagtttaacgttgtttggcggtgatacgttggtggtgcgttgttccgaacgctgccacattcacctgatgagcgccaaagtgcctggcgatagtcatgcggatattctgagcgtgcaggacagagatagcgcgtatctgaccgtgccttacagcggcacctggaacgttctcatcgacagccacagccagtcgctggagcactccatcagctacgttcccgcctgatagcaaacgcccggggaaacccgggcgatatactcttaagccagcccgggctggctgctttcccccagtagatgacgcaccttgccgactaaatcgtcgaggcaggcatcgtacatcccgagtttccgcagctcctgatcgagcgagaacagatactgagcgttggtgccaagcgggccgctggcgcgggctatcagcggcgcaatcacctgcgcgctggtatccgcctcaaacagcggatgacgcgggtccataataaaaactaatgcattgacggtgcggccatcgtccagatccagcttgcaccaggtcggcaggtagcagccggtgatcatctcccgcttccacagcagggtcagctcttcttcgagagtgtcatcaggcaggcggtaggcaaccccggtggtgcgcccgccctctttcaacgccagcattcgacccggctgagtggcgctaccgcgcccggcggtgagccgcaggcaaaacgcgcggtgccagcccggtagcgtaccggtacaggactcgcgatactccagcgccggattccacatcagcgaaccgtagccaaagatccacaccgagccatcgtccggacgacaggccagggtcgccgccaaagaggctgcccgctgctctgccgaccaaagaagcgattcctcaatagcgccaaacgccgttttacaatccgcattcagtaagaaatcacgcgttaacactttctactacctccgccactgcccgcttcccggcgattatctggtgccatccgtgaagtattgccgaattattatccagctttatttgacaataagcaatgaacgagccgcgggcaagggctcaggcagcacatgacgtagcaaaagcgattacttcttcttatgccacttatcatcatcgcctttttggtactcatttttcaccgccgcccaggcgactttgtgcgccgtctcttcacggctggcgtcatcgcgtcggtcttctttatgcttatactggtcccaggcgctgttaaaggcctctttgtaaatctcctgggcatgcgcaggcagaacgtgctgaacgctgtcgggtaattcacttttgttgctatagggcatggcgacctccagatttagggtgaatagtcagtctgtcaggcgatttaccggctggcaaggcgatggataaatgagaaagatgttttagtaattatctgaataataaatacaaaacgagagtaaccgcagtttatggcaatctaccacttttccatggtcagagtggtaaatttaagtaaaaaacaaagtagttcgatcaatgtctgttattttattaacttacagtatctataattataacacctgcacacctggagataattcatgaccgatgcacatgaggcggtgaaaacccgccacaaggagaccaccctcgcctttccggttctggcgctggcggtgctgtttttctggggaagcagccagtcactgccagtggtcgttgccattaatatcctggcgctggtcgggatcctgagcagcgcgttcagcgttgttcgccacgccgacgttctggcgcaccgccttggcgaaccctatggttcgttaattttaagcctttcagtggttattctcgaagtcagcctgatttccgcattaatggccaccggcgacgccgcgccgaccctgatgcgagatacgctttattcaatcatcatgattgttaccggcgggctggtaggtttttctttattgttgggcgggcgcaaattcgccacccagtatatgaatctgttcggccttaaacagtacctcatcgccctctttccgctggcgatcatcgtcctggtctttcccatggcgctgcccggggctaatttcaccactggccaggcgctgctggttgcgctgatctccgccgccatgtacggcgtgttcctgctgattcaaacgaaaacgcaccagagcctgtttgtttacgaacacgaggatgacggcgacgacgatgacccgcatcacggcaaaccgtcggcccatagcagcaagtggcacaccgcctggctgctggtacacctggttgcggttatcgccgtgactaaaatgaacgccaatccgctggagacgctgctgaccagcatgaatgcccccgtcgcctttaccggcttcctggtcgcgctgctgatcctctctccggaaggccttggcgcgctgaaagcggtcctgaacaatcaggtccagcgggcgatgaacctgttcttcggctccgtgctggccaccatttccctgacggtaccggtggtgacgcttatcgccttcctcaccggcaacgaactgcgctttggccttggcgcgccggaaatggtggtgatggtcgcctcgctgctgctgtgccagatatcgttctctaccgggcgtaccaatgtgctaaacggcgcggcgcacctggcgctgttcgccgcctacctgatgaccatttttgcctgaacctcccccggcggcgtcatgccgttcggggagatcaaaaaagcctgccggttataaaaccggcaggcttttgtcgtttcagcagcgattacttgctggtatcgagctcatcaaagcttttaacaagatcgtcgatggctttcatctgcttgaggaacggctccagtttatccagcggcagcgcggacggaccgtcgcatttcgcgtgttccggatccgggtgcgcttcaataaacaggccggcgatacccaccgccatcccggcgcgcgccagttcggcaacctgcgcgcggcgtccgccggaagcggcgccaaacgggtcgcggcactgcagagcgtgagtaacgtcgaagataaccggtgagttattggaggcctttttcatcacgccaaagcccagcatgtcgaccaccaggttatcgtagccgaagttcgcgccgcgatcgcaaaggatcactttgtcgttgccgccttcgataaacttatcgacgatattgcccatttggcccgggctcacgaactgcggttttttcacgttgatcaccgcgccggttttcgccatcgcttcaaccagatcggtctgacgggcaaggaacgctggcagctgaataacgtccaccacgtcagcgaccggctgagcctggctggcttcgtgaacgtcggtgatgattttcacgccgaacgtttgtttcagctcctggaaaatcttcatcccttcttccagccccggcccgcgataggagtggatggaagaacggttagctttatcaaaagaggctttaaacacataaggaatgcccagcttctgcgtgacggtcacgtagtgttcgcagatacgcatcgccagatcgcgggattccagcacgttcatgccaccaaacagcacgaatggcaggtcgtttgctacgttgatatcaccaatgctaaccactttttgtttcataagttcgccttatcagggtgtaaccggaatggtttcagactaatgcaatgtaatttgtttgtgcgaaatggtgttgatctgcgcgcggatcatctcgctgatgggatcctccgggcactgttcaacgaagtaactgaggtcctgcagcgccacgtgatcgcaatccagctgggcgtatatcagtccccggtcgcgaatttcgtacgggtcttccggattgaactgcagcagcgcttcgctggtccgtaacgccagctccatctgccgctcttccatcagcgccgatttgagcgtgtcgagcagcttgcggatcacttccgcgttgtcggcttcatcgaggtcttcgttaaacaactcggcgaccggactaatattgcccttcagccacacttccagcgtatgctcgttgagcgtttcgccgttaaatggattaatgagccacatctcttcgctctcttcagggtcggcgcgcagcagcatctgggtcggaaaaatcaccggcaccaccggcagcgccagacgctgagcaatccacagcaggattgcgcctagcgataccgcgctaccctgacgattgttcaggactttatcaagccagagcacgtcggacaggcggtaaacgccgcgcgaatcgctaaagccccagtcatgatagaaaagctccagcagacgttctatctggcgctcctggtcccacgaagcggcaatctcctcacgcgccaggcccagcagccgctccagctcatcctgcacatagtgcgtcggaaaatcgtcgcggattaattcagaaatgaggaccatgccgtcgcataacggcgctttattaaattcgaaatcagctaacgacctcatgccttaccccagtaacggtgttcttgtgatggcgagttgaataatgataaacaacaccaccagggccagcagaaaggcgacaaaccggctctgctgactgcgctggcgacgacggcccagcgcgataaatcccaatgcgatataaatgataacgccaaacagcttctcagtcagccatgtaccctcttcggtaaacggcagatagtgcgttattgccattagtccggcgccgctgagaaacagcagcgtatcgctacagtgcggcgcgatacgaacccagcgctggtcaagcagacggttaccgctccagctccaccagtagcgcagcacgaacaggctcaccgaaaccaccacgcaggcgatatgcagatacagtaccgcgttaaacagattcatacgcctccctgatattgcccgagcgtcagacgctcgttgtctccgtagtcgcgacaggtggcaatattgccataacccgccgcgcgaaagattgcgcgcaccgcttccccctgcgtccagccgtgttccagcagcatcacgccgccggcagccagatagcggcggccttcgcggatgatatgcgccagatcggccagaccgccatcggcggcgaccagcgccgttttcggctcaaagcgcacatcaccctgcgcaagatgcgggtcggtttcatcgatatagggcggattgctgacgatgatgtcgaactgctgaccggcgagcgcgctaaaccagtggctttgcagtatcctgacgttagggatagcgagatgttcagcgttacgcgccgccagcgccaccgcgtcgggcattacgtcaacggcggtgacgtggcaatcggggcgttcgctggccagcgccagagcgatggcgccggtgccggtgccgagatcgagaatacggcacggcttgtcggataaccgcgccagcgtctgttcaaccaggcattcggtatccggacgcgggatcagcgtggcgggagaaacgaacagcggcagcgaccagaattcgcgctggcccaccagatgagccaccggctcgccccgggcgcgacggctgagcagcgtttccagctcggcggcctgcgccgccgtcagcgccgtttcgccaaaggcgagaatataggtccgcgctttgccggtcacgtgacccagcaggatttcggcatcccggcgcgggctttcactttggctcaggcggacgatggcctgcgtcagccactgctgaaaagtcatcattcctgctcggaaagggcggccagctgatcggcctgatattcctgaacgatcggctcaatcagcatatccagcttgccttccatcgcttcgtccagacggtaaagcgtcaggttgatgcggtgatcggtcacgcggccctgcggaaagttataggtgcggttacgatcgctgcgatcgccgctgcccagcaggttacggcgctctgaggcttccgcctgctggcgcctggagacttccgcggcgcgaatacgcgcgccaagcaccgacagcgctttggctttgtttttgtgctgagaacgttcgtcctgacactcgacgacgatgccggtcggcaggtgggtaatacggatcgccgagtcggtggtgttaacgtgctgaccgcccgcgccggaggagcggaaggtatcgatgcgcagatcgctcgggttgatatccggcatttcggcttccggcagctccggcatcaccgccacggtgcaggcggaggtatggatacgcccctgggattcggtggccggtacgcgctgtacgcgatggccgccggattcgaacttcagtcgcccatagacgccgtcgccgctgattttggcaatcacttctttaaagccgccgtgctcgccttcgttggcgctcatgatttccacgcgccagcggcgtgattccgcgtaacggctgtacatacggaacagatcgcccgcgaacagcgccgcttcatcgccgccggtaccggcgcgaacttcaacaaacgcgttacgctcgtcgtccgggtcttttggcagcagcagaacctgcagctgctgctccatctgctcacccttttctttcgcttcgcgcagctcttcctgcgccatttcgcgcatttccgggtcgtcgagcatcatctgcgcggcttcgatatcatcctgcagctgacgccagtcggtgtagcagcgggcgacgtcgctcagctgtgcgtattcgcgcgacaatgcgcgaaatttatcctgatcggcgatggttgcggcatcgccgagtagcgcctgaacttcctcatggcgttcgtaaagggcttccagtttggcaacaatagaaggcttcataggcgtgaattcaccctgtcctaaaaagagagaaaggtgcgctattccagcccgaggctgttgcgcagaatatgcaggcgttcatcatccccgtcacgggcggcctgctgaagagatttggttggcgagtggatcaggcggttagtcagcttacgcgccagatcctgcatgatttcctgcgcatcgccgccctgattgagcgcagccagcgcttttgccgtcagctcctcgcggacctgttcggcctgggagcgatattcgcggatagtctcgctggcgctctgagcgcgcagccaggccataaattcgctggcttcctgctcgacaatggtttccgcctgtaccgccgcggctttacgctgcgccagattgtgctgaatgatgttttgcagatcgtccacgctgtaaagataggcgttcgccagcttgccaacctccggttcgacatcgcgcggaacggcgatatccaccagcagcatcggctgattgcggcgcgccttcagcgcgcgctccaccatccctttgccaataatcggcagcgggctggcggtagaactaataatgatatccgcttcttttagccgttcgtcgatatcgctcagggcgatcacctccgcgccgacttcatcggccagcgcctgagcgcgctcgcgggtgcggttagcaatcaccatcttgcgcaccttatgctcgcgcagatggcgggccaccagctcgatagtctcaccggcgccaaccagcagcacggtcacgctggagagtgattcgaagatttgtcgcgccagggtacaggcggcaaacgccacggagaccgcgctggcgccgatatcggtttcggtacgcacgcgtttggccaccgagaacgacttctggaacatgcgctccagctcgctaacgttcaggtgaccacggctggagtcggcaaaggcttttttcacctgcccgaggatctgcggctcgcccagcaccagcgaatccaggccgctggcgacgcgcatcagatggctaaccgcctcgttgtcctgatgccagtagaggcttttgcgcaggtcgtcttcatttaaaccgtggtagtcgcacagccagcggataagcacttcctgaaggttatcctgctcttcgacgctgagatagagttccgtgcggttacaggtcgacagcaccaccccgccctgcaccattggctgggccagcaagctctccagcgcctgatcgagcgtatccggcgaaaacgttacgcgttctcgcagcgctacaggagctgttttgtggttaatgccaagagctaaaagcgtcattgtgagggagtagtaccagcgttgctaaggttagtctgcaggcatcatacaggatgcgcgtaatcaataaaagagaggctccccttttggagtaatagctaatctgtaatagccattaacggtaattttttgatttcagacaacttgaacgtagacgctaccgtccggcaacgctagcattaatggttataattgtaacccgctacacaaatcggccgcctgtttctcccattcgccgcatttcactgtagacatcaaggatttgtcatcattatgaatcgactgttccgcctgttgccgctggcaagcctcgttctgaccgcctgtgcgattaatgctccgaaagggccgggtaaaagcccggattctccacagtggcgtcagcaccagcaagatgtccgcaatcttaatcagttccagacgcgcggcgcttttgcttatctttctgatgagcaaaaagtctatgcccgcttcttctggcagcaaaccggccaggaccgctaccgcctgctgctgactaaccccctcggcagcaccgagctgtcgttaaccgcccagccgggcagcgtgcagctgattgacaataaaggccagacctacacggcgaccgatgccgaagagatgattggccgcctgaccggcatgccgattccgctcaacagcctgcgccagtggattattggcctgccgggcgaggccaccgactactcgcttgacgaccagtaccgcctgcgcgagctgaactacacgcaaaacggcaaaacctggcacgtcacctacggtggctacacctcggacaccaaaccttcgctaccggccaatatggagcttaacgacggcagtcagcgcatcaagctgaaaatggataactggattgtgaaatgatgacccgctggccttctcccgcaaagctgaatctgtttttgtatattaccgggcagcgcgccgacggttaccacaccctgcagacgctgtttcagtttctggattatggcgacacgctgacgattgaaccgcgcgacgatggccagctgcgtctgctgacgccggttgacggcgtgccggatgaagagaacctgattattcgcgcggccaggcttttaatgcaggccgcagcccaggccgggaagcttcctgcgggcagcggcgccgatatcagcatcgacaaggttcttccgatgggcggcggcctcggcggcggttcgtccaacgccgcgaccgtactggtggcgctgaatcacttatggggctgccatctctcggaagatgagctggcggcgttgggtctgcagctgggcgccgacgtgccggtgttcgtgcgcggccatgcggcctttgccgaaggcgtcggggaaattctcaccccggccgaaccggaggaaaagtggtatctggtggcccatccgggagtgagcattcccacgccgatcatttttcgcgatccggaactcccgcgcaataccccgtcaaggtcaattaatacgttattaaaatgtaaattcggcaatgattgcgaggttatcgcaagaaaacgttttcgtgaggttgatgcagcgctttcctggctgttagaatatgcgccgtcgcgcctgactggcaccggtgcatgtgtgtttgctgaatttgacactgaatccgccgctcgtcaggtgcttgaaaaagccccggcatggctgcatggcttcgtagcgcgaggtgttaatatctctccgctcaagcaggcgctgcgctaagttctgctcattatagcaaatttggtgaaaacgccggggaaactgagttacggtgacaacgtcaccctgttccagacgttgcatcgggctctttaaatacaccgcctggatgaaatcgtgcccacccgcaccgtttttggcccatttcatccaccactggacgcatgcctgaggttcttctcgtgcctgatatgaagctttttgctggtaacgccaccccggaactagcacaacgtattgccaaccgcctgtacacttctcttggcgacgccgctgtaggtcgttttagcgacggcgaagtcagcgtacaaatcaatgaaaacgtacgcggtggtgatattttcatcatccagtccacttgtgctcccaccaacgacaacctgatggaactggttgttatggttgatgctctgcgtcgtgcttcggcaggtcgtatcaccgctgttatcccctacttcggttatgctcgccaggaccgtcgtgttcgttctgctcgtgtgcctatcaccgcgaaagtggttgctgacttcctgtccagcgtcggcgttgaccgcgttctgaccgttgacctgcacgcagaacaaattcagggcttctttgacgttccggtggataacgtattcggcagcccgatcctgctggaagatatgctgcagctgaacctggataaccctatcgtggtttctccggacatcggcggcgtggttcgcgctcgcgctatcgccaagctgctgaacgataccgatatggctatcatcgacaaacgccgtccgcgcgctaacgtttctcaggtgatgcacatcatcggtgacgtcgccggccgtgactgcgtaatggttgacgatatgatcgatactggcggtaccctgtgtaaagctgcggaagcgctgaaagagcgcggcgcgaaacgcgtattcgcctacgccacgcacccgatcttctccggcaacgccatccagaacatcaaaaactctgtgattgacgaattcgtcgtctgcgatactattccgctgacgccggaaatcaaagcgctggaaaaggtacgtactctgacgctgtctggtatgctggccgaagcgattcgtcgtatcagcaacgaagaatctatctctgctatgttcgaacattaatcgagcccggctcaaaaacccgctgcggcgggtttttttgtctctgaaccttttattctccacaaaatcattcggcatgcgtcaaggcggcaagtgaatgaatctccggctgcgtacaggcagtacgagatcggggtaaatgaacgcagccaacacagaggcatcccgaaggatgacgtggaaatgaccgatgcctccttcacctgccatttagttgacagatgatgcgctcatggatgaaacattattgtgaacagattattttcctcacatgtgatgcctttccgcgccctcatcgacgcttgttggaaagaaaaatataccgcttcgcggtttactcgtgatgtgattgccgggattaccgtcgggattatcgctatcccgctggcgatggcgctggcaattggcagcggggtggcgccgcagtacggtctctatacctccgcggtggcggggatcgtaattgctttaaccggcggctcgcgcttcagcgtgtccgggccaaccgccgctttcgtggtgatcctctacccggtctcgcagcagttcgggctcgccgggctgctggtcgccaccttgatgtcggggatcttcctgattcttttcggcctggcgcgctttggccgcctgattgagtatattccgctatcggtcaccctcggcttcacctccgggatcggtatcaccatcggtaccatgcaaattaaagattttctcggtctgcagatggcccacgtgcctgaacattatctgcagaaagtcggcgcgctggcgatggcgctgccgaccattaaccccggcgatgccgccatcggcgttgtcacgctgggcacgctgattatctggccgcgtctggggattcgtctgccgggccacctgccggccctgctggcgggctgcgcggtgatgggcgtggtcaacctgcttggcgggcacgtcgccaccatcggctctcagttccactatattctcgccgacggcagccagggcaacggtattccgcagctgctgccgcagctggtgctgccgtgggatatgcccggttcggacttcaccctcagctggtcctcgctgcaggcgctgctgccggcggcgttttccatggccatgctcggggcgattgagtccctgctgtgcgccgtggtgctggacggcatgaccggcaccaaacacaaggccaacagcgagctgattggccaggggctcggcaatatcgtcgcgccgttcttcggcggcattaccgccaccgccgctatcgcccgctcggcggccaacgttcgcgccggggcgacctcgccggtttccgccgtgatccacgcgctgctggtgatcatggcgctgctggtgcttgcccctctgctctcctggctgccgctttccgcgatggcggcgctgctgctgatggtggcatggaatatgagcgaagcgcacaaggtcgttaacctgctgcgctatgcgccaaaagacgacattatcgtcatgctgatgtgtatgtcgctgaccgtcctgtttgatatggtcatcgctattagcgtcggtattgtgctggcttccctgctgtttatgcgccggatcgcgcggatgacccgcctcgcgccggtcaacgttgaggttcccgatgacgtactggtgctgcgcgtcattggtccgctgtttttcgccgccgcggaagggttgtttaccgatctggaaacgcggattgctggcaagcgtatcgtcgtgctgaagtgggatgcggtgccggtgctggatgccggcgggctggatgccttccagcgcttcgtgaataagctgccggaaggctgtgagctacgcgtgtcgaacctggaatttcagccgctgcgtaccctggcgcgggcaggcgttaagccgattccgggccgcctgagcttctacccggaccgcagcgccgcgctggcggatatttaattacccggcggcaggccccggcgcctgccgcatcattacgccaatcgcctgctgaagccagccaagcacctccggcgtcatccacgttcccttcattaaatgcggctcccgctccatggcataacgaaacttctgctgcgtgtgcggatcctttcccgcgtaagactggaacagcgccagccagcgctgcgccagctgctgaccctccgcggaggcaggctcccgcttctcacgacaggcccgatgcagctcggccaccagcgccggccactccatcaggcgatcgaaatagtgctgccgtgtaaaagccagctcttcggcgttcagatagcgcgcccagatggccagcttgctttcggcaaaagcacgggtaatgaaatcaatcatctccggcgtcaccccggtttgttcgcgcatctgcggttcggcggcgtgcatctcattcaggcgagtgagaaactccggcctgccggcggtatcctgctccagctgcgccatccagcgggtggccagcgcaatcgcccgaggctcatcggccggacagcgttcgcccataagctgctgcgcttcacccaccagctccagccatatctggttacgctgcgcatcctgctctgcgaacggcagcacctgtaattcctgttgactaaaccagcgatcgtacattttcatcagctccagcgtttgtagccaggactccaggtcgggctcgtctccgcagtccagctcttcacgcagcagcgccaggcgctggcgcagcgtggagagggtttgcagctgccggtcgagggtggcgatctgcttgaccagcaggtcggacagcgagaaggcgtcccggtcgagatagtccttgatagtggcgagttccagcccggcctgcgccagcgctttgatcatatgcagtcgctgaacggccgccagattatagagccggtaacccgccgcgcttctggccgaaggcgtcagcagtcccgtttgttcatagtgatgtagcgtgcggacggttatgccggcgcgcttcgccagttcacccacctgaattaacatgactgctcctttcgtttaccagtggcgccactctgctgcctgacgtgacgtcagggtcaagcgttctgtacaggaattgtattaggcagacggtggcgaagaaagacgaagagagaaaggagaatttgagacaccaacaggcgggcagcctgaacgggcggcatgaaagcgcaccagccgttcacaacggctggcggtctggaattcactcagctgtggcgatgctgatcgcggcggcagcgtttatcgtagtggcgaacccaccagtatctgtcgctaacctgttcatgaccgccgatacgggcgccagccagccacagtaccgcgccgacaaagatactcaagatcgcgccgtgtgcgaaaaactgcggcaggtcaagctgcggaagctggtttagaatagaataaccaacgccgacaaccatgacgaccaaccccaaccccatcagcacattaccgagtaacgaagcgtttctgcgtttcatatgtcacctccggaaccttgggttgcatgggaatatccccaaatcttataggtgtagtatagacaatggccaatatagcgattgcgtggacgatcacagaagcgaacatcttgccaacaaaagtttacaaataacccactgaacaacatcaaattctaattattcaaacccgtgattatctgtggcgggtgcgtttcgctggcagaattttgtcaaccgcgcgcgcagacagtacactacgcgccagagaacgatccaagcaggataaaaaagtgagcataaaattaattgtcggcctggcgaaccccggcgctgaatacgcagcgacccgacataacgccggcgcctggtacgtggatttactggctgaacgccaccgcgcgccgctgcgcgaagagagcaaattcttcggctacacctcgcggattaaccttgccggcgaggatgtccgcctgctggtgccgacgacctttatgaacctgagcggcaaagccgtcggcgcgatggcgactttctttcgcatcaacccggacgaaatcctggtcgcccacgatgagctcgacttaccgccaggcgtggctaagtttaagctgggcggcggccacggcggccataatggcctgaaggacatcatcagcaagctgggcaataacccgaactttcaccgcttacgcgtgggaatcggccatccgggcgataaaaataaagttgtcggttttgtgctgggcaagccgcccgccagcgaacagaagctgattgatgaggccgttgacgaagcggcgcgctgcaccgaggtgtggctgaaggatggcctgaccaaggcgaccaaccgtttacacgcttttaaagcgcaataaccggtcggcgtgcggaatttttgtcacgcaccgtgtataataggcgaagctatttacttttctgcaatctgttcactgtaacaggttgattatccaaagattaaggtgatttaaatcatgggattcaaatgcggtatcgtcggtttgcccaacgtcggcaaatccaccctgttcaatgcgctcactaaagcgggtattgaagcggccaacttccccttctgtaccattgagccgaacaccggtgtcgtgccgatgcccgatccgcgtctggacaaactggctgaaatcgtcaaaccacagcgtattctgccaaccacgatggaattcgttgatatcgcaggcctcgttaaaggcgcgtcgaaaggtgaaggcctgggcaaccagtttctgaccaacatccgcgaaaccgaagctatcggtcacgtggtgcgctgtttcgaaaacgacaacattatccacgttaacaataaagtggacccggctgacgatattgaagtgatcaataccgaactggcgctctccgacctggatacctgcgaacgcgccatccatcgcgtgcagaagaaagccaaaggcggcgataaagacgcgaaagccgagctggcggcgctggaaaaatgcctgccgcaccttgagaatgccggtatgctgcgttcgttgaaaaatctgaccgacgaagacaaagcggcgattaaatatctgagcttcctgaccctgaagccgaccatgtatatcgccaacgtcaacgaagacggctttgagaacaacccttatctcgataaagtccgcgaaatcgccgccgccgaaggttctgtggtggtcgccgtttgcgccgccgttgagtccgatatcgccgagctggacgatgccgaccgcgatgagtttatggccgagctgggtctcgaagagccgggcctgaaccgcgttatccgcgccggctacgagctgctgaacctgcagacctacttcaccgcaggggtgaaggaagtgcgcgcctggactatccccgtcggcgccactgccccgcaggccgcgggtaaaatccacaccgactttgaaaaaggctttatccgcgcgcagaccatcgcctatgaagactttattacctataaaggcgaacagggtgccaaagaagccgggaaaatgcgcgctgaaggtaaagactacatcgtgaaagatggcgatgtgatgaacttcctgttcaacgtctaaataaaatttgttgtctcatgaggtttcattgaacctcatgaacatcgaaaaaaaccacaaaatccacgcaattgcgtggatttttcatttcagcaagcgcgtaagcaagtcgcagatggagttagcccgacacaggctcgccagttagataagatccgcaaggtcaacgacgtctccaacacctttaagctgatcgctaaagagtggttgcagatgaaagactgggccgaaattaccaaaacgcgccgactggatatgcttgaacgtgtggttttccccgcaataggtaatctcccaatcagagaggtcactccacaccacatccttagaattcttcaagaaactgctaaacgaggagcaccgacagttgccgctgaagctcgccgcaccgtttcatcagtttttgagttagcagttgcaacgcttagagctgatagcgatcctgtacggcctgttcgcaaggcccttccggccaataagacacagcacaaacaagcactgaatcctcagcaaatcggaaagttattaaactgttttgataatagtcgtggctcgtaccaggttaactattgtatgtggcttatgtggtggacattgacgcgtcctgcagaagccaccgaagcagaatggacagaattcgatcttgataacgccctgtggacaattccggcagcgcgaatgaaagcccgcagagaacacgttattcccctaccctcccaagctatcaaaatgctcagaacactacagggattaaccgggcatcggcagcaccttttcccgggcagggataatccgttaggtccaatgacatcgcactcgctgcgccagctacgtaaaagcctcggctggagtggtacatatagcccgcatgcaacccgaaccacaggaagtacccgtttaaacgagatgggctatcgacctgatgctattgaggcccaacttgcgcacgctgataccaacaatgttcgtcgcacatacaaccatgcaacttatcttgatgagcgaaaggttatgatgcaggactgggcaaataaacttgaagaatgggtaggaagcgcgcgcagcactattgatgtttcgtaaaccatgatgtattggtctgttaatgctgattattaacgataatttcccatcagattataaaaactatatttcagtctacatttttgtaactatctgattatacgaccattgtactctcctcacccagcgttataatttcttagcacccattagcgcaggatgttcccatgagccgataccgtgtctctggcagtgaaggacaatatgagaaaaactccgatgagcaagttctggcaaataagctggggattgctgattctggtgagatggacgaagcggagcttgtgctgttagagaagctctatcactgcatttttgaagagcagtttccagcagggcagatcaccgttgctttgctgaaaagctggcatcgccgctggctgggaaacatctatgagtgggccgggcaagaaaggactgtcaatatcagcaaagggggctttatgttcgcgccctctgcacagttgccaaaactaatacacgaattcgacgctaaataccttgcccgatatacaccatgcactaacatgagcgaagaacagatcatagaggctattgctgtaacccatgtagagctgatactcatccatccattccgggaaggcaatggacgtttatcacgacttttagctgatgtgatggcagttcaggggggacacaggccgctggattatcaaagctgggagcaaaacaaagccgaatatatttcggctatccacgcaggtatgtcaatggactacggcccgatgtgttattgggtcggtactgcgttaagacgtgattaaacagcaagacgaagatgggcgaactttttgcgcgtcgcttcaagcgaagcttcgatcttctcagaagactgccccgtctcaacggcggttgacgttgctaccgagcgaacaatgtcagcgcgagacggtttaacgtaatacacctgcgttttcttgtcattgctcatcgcgattcctcagctatcgaatgtgtaatctgtactcattatatcaaggtttcgacacgacttcacatcatctatagcccgacgtcatcaaggggccatctagctctgatttagcactgcactgaatttgggccagggtcagtggtaactagcctcagatagcagcatcaactaaagtgagtacagacatgagtatgaaaataaaaatcaaaaataaaaacattaaatatcaattcaataaatatcaaatcacgattcaacgtctaagcgtttcttcgccgtcatgccctccacaaaatccacgcgctcgcgtggattttttattgcccgccgttcccgtcagttctgacccgccgccagcgaatatttctttattttgcgatacagcgtggcgatgccgatgcccagctcatccgccgcctgctttttattactgtagcgagagagcgcatcgcggatcatctgccgctccatctcctccagcgccgtcacattctcctcctgagtgagggtcgctggcgctgaagccgacgacgtcgcctggctcgccgcttctccgctgcttaacagattcggcggcagcagcgacatatcgatgatttctcccgacggcaccacgttgaccaggtactccatcaggttgctgagttcgcgaatattgcccggccagcgatagcgcttaaggaaatcgatcacgtcctgcgcgacgccgggataaaccagattgagacgaccggtatgcagatgcaggaaatagtgaatcagcagttcaatgtcgtcctgacgttcgcgcagcggcggcagacgcagcggaatcacgttcagacgatagtagagatcttcgcggaacttcccttccgcgatgtactgttccaggttttgattggtcgcggatatgatacgaatatcgacctgaaccggatggctggcgcccaccggctgaatctcacgtgactcaatggcccgcagcagcttggcctgcagagtgagcggcatatcgccaatttcgtcaagaaacagcgtcccgctattggccgcctgaatcaggccggtcttaccgtttgccgatgcgccggtaaacgcccccttcacgtagccaaacagttcgctttctaacagctgctcgggtatcgcggcgcagttaatcgcgataaagggcttcgcatggcgatcgctgagcttgtggatagcgcgggcaaccacctctttcccggtcccgctttcaccggcaatcatcacgctggaggggctcggggccacgcggctgatcagctttttaagctgccgcataggtcgacactcccccaccatcgcctcaatctgcggcccttcctgcccgcagctgaaatcggccgaagagtgcgactgatggaacgccattaaaaataaccactgatcctgcaccgcgtgcagctggccgataatgagctccttgcgatcgtcaaaggagataatgtgctgcatatggccgtgcttgaaattatcttcgaaggtcaacggctgaaactggattgacttaccaatcacctgtccctgagtgacgctcattattttcaaagcggcctggttggcaaatttgactctttgatcgttgcccacgaccagtacgccctgatccatattttcgatcatggttaaaaatattttatggatattgtcgccgaccgcccgctcctgcaaaaagcgggaaacgaatatggttgagacatgacgaacataatcagaaaactcctggatattcgcatttatacgttcctgctgctcgcgcgtcagcgcaaccaggctaataacgccgacgcagcggtcgtgatacatcaccggcgtgccaagaaaggctttctcttcgcatttctccttattgttacagtctttacacagggggtcgaagcgggagtgggtaacgaccttctcggtctgtgtttcaataatgtaacgcagaagccgtgaatttgaatttaatttatagccaatctgtttactataagcgccagttccggcgacccggtataattcgttatcaacaatctcgacctccagctgcagcacgctggatagcatccttgcaaacttttgaattgtaggctgaatctgcattaaaatggagggtgctttggacggtatcatgtctatcggccttctattattgctcacctgttcggcgtcaagcgaagcggctttatttatctgcggggaatgataccactccttttagccacccgcgttgatatagatagggccaattcccccaccttatcttaaatatgcaagagctatcacagtttcttatcattatgataaatttgccgcggtttttatcatattggcgcaatgtgaagatgataatcgcattatttacggcggcaacccgcgcctgtcccgcagaaatggacggcgggggggatattttcacctttctcttcccgggataactcgcctgaattcgtgacagacctggcataatcttaactattcaatcctctccgccgcctctcccggaggatttggcacgcttattgttagtggtaatacagcgctggcagtcgctaattcggcaactctgcatatccgaccgcacagcaatcaataagccgtcattcacgaccaggattgaaacatgaaaactgttaacgaactgattaaggatatcaataaacttaactctcatctcagtgagaaagactttctgctgacctgggaacaatcgccggatgagctgaaacaggtgctggacgtcgccgccgcgctaaaaacgctacgcgctgaaaatatcgccaccaaagtgtttaacagcggattgggtatttccgtgttccgcgataactcaacccgtacccgcttctcctacgcttccgcgcttaacctgttagggctggcgcaacaggatctggatgaggggaaatcgcagattgcccacggcgaaacggtccgtgaaaccgccaacatgatctcattctgcgccgacgccatcggcattcgcgatgacatgttccttggcgcgggcaacgcctacatgcgcgaagtcggcgaagcgctggacgacggccacaagcagggcgtcctgccgcagcgaccggcgctgatcaatctgcagtgcgatatcgaccacccgacgcaatccatggccgatctcgcctggctgcgcgagcacttcggttcgctggagaatctgaaaggtaagaagatcgccatgacctgggcctactcgccgagctatggcaaacccctctcggtgccgcagggcattatcggcctgatgacccgcttcggtatggacgtcaccctcgcccacccggaagggtacgacctgatccctgacgttatcgaagtggcaaaaaacaatgcccaggcctccggcggcagcttccgccaggtgaacagcatggaggaagcctttaaagacgccgatatcgtctatccgaaatcctgggcgccgtacaaggtaatggaaaaacgcaccgagctgctgcgcacaaatgaccatgaaggtctgaaggcgctggagaaagcctgccttgagcagaacgccggccataaagactggcactgtacggaagagatgatgaagcacacccgcgacggtgaagcgctgtatatgcactgcctgccggcggatatcaccggcgtctcctgcgacgcgggcgaagtcaccgagggagtcttcgagaagtaccggatcccgacctacaaagaggccagctggaagccgtacatcatcgccgcgatgatcgtctgccgcaaatacgcgaacccgggcaaggtgctggagcagctgctcaaggaagcgcagaaacgcatcaaataatccccaggctggcctgcgggccagccccacgactttcgcatttcaaaaaggataaggatcgagtatgtctgctttctcactgaaaatggatattgccgaaaaccgtttttttaacggagagatttcaccgctgttttcacgccagcaggcgcagcaggctcgccgctttcatcaaaagatcgccggctatcagcctacgccgctggtggcgctgaacgaactttccgcgctgtttggggtacaaaaaatcctcgttaaagatgaatcccggcgctttggcctcaacgccttcaaaatgctcggcggctcttatgctatcgcccggctgctgtgtgaaaaatatcatttagatatcaacgatctctccttcgaaacgctcaaatccagcatcaaagagaagatgacgttcgccaccaccaccgacggcaaccacggccgcggcgtggcgtgggcagcccgccagttaggccagaacgccgtcatctatatgccgaaaggctcagcgcaggagcgggttgacgccatactgcgcctcggcgccgagtgtatcgtcaccgatatgaactacgacgacaccgtccgctttaccatgcagaccgcgcagaaaaacggctgggaggtggtgcaggacaccgcctgggaaggctatacgaaaattccgacctggattatgcagggctacgccaccctcgccgatgaaacggtagaacagctctcctcaatgggtatcgcccgtccgacgcacgtgcttctgcagggcggcgtgggggcgatggcgggcggcgtgctgggctacctggccgatgtctacggcgcgaagcatctccattccattatcgtcgagccggagctggccgactgtctctaccgctctgcgctgaagggccagatcgtcaacgtcagcggcgatatggccaccattatggccggtctcgcctgcggtgagcccaacccgctgggctgggaagtgctgcgcaactgcgccacgcagttcgtctcctgtcaggacgccgtcgccgccctcggcatgcgggtgctgggaaacccggcgggccaggatccgcgcgttatttccggcgaatccggcgccgtcggtctcggcctgctggcggcgattcatttccatccgcagcgcgaagcgctgatgcacaagctcaagctggatagcgattccgtggtgctggtgattagcaccgaaggcgacaccgacgttaagcactatcgcgaagtcgtctgggaaggcaaacatccggccgcgcagtagccgattgatcaacattcctcccgcccggcgggacccccgtattcagaactggagaacatccttatggctaagcaaattccgttcaacgcgatcctggaaaaatcaaaacaatacgaaaaagagatgacccgcttcctgcgcgatatgatcgccatccccagcgaaagcagcgatgagaagcgcgtggtgcaccgtatcaaagaggagatggagaaagtcgggttcgacaaagtggaaatcgatccgatgggtaacgtgctgggctacatcggtcacggcccgcgtctggtcgccatggacgcgcacattgataccgtcggcattggcaacatcaagaactggaacttcgacccgtacgaaggtatggagaccgatgagctgatcggcggacgcggcgcgtctgaccaggagggcggaatggcctccatggtttacgccggtaaaatcattaaagatctgggcctggaagatgagtataccctgctggtgaccggtaccgttcaggaagaggattgcgacggcctgtgctggcagtacattattgaacaatccggcatacgtccggaattcgtggtcagcaccgaacctaccgactgccagatttaccgcggccagcgcgggcgtatggagatccgcgtggaggttcagggcgtcagctgccacggctccgccccggagcgcggcgataacgccatcttcaaaatggcgcccgttctcaccgagctggaacagctttcgcacaagctgggcgatgacgaattcctcggcaaaggcaccctgaccgtttccgagattttcttcacctcgccgagccgctgcgcggtagcggatagctgcgccgtctccattgaccgccgtctgacctggggcgaaacctgggaaggcgcgctggaagagatccgcgcgctgccggcggtgaaaaaagccgccgcggtggtctcgatgtacaactacgaacgcccctcctggaccggcctggtctacccgaccgaatgctacttcccgacctggaaagtggaagagaaccacttcaccgttcgcgccctgagcaacgcctatgaaggtctgttcggcaaagcgccggtggtggataagtggaccttctccaccaacggcgtctccattatgggccgccacggcattccggttatcggctttgggcctgggaaagagccggaggcgcatgcgccgaatgagaaaacctggaaatcgcatctggtaacctgcgccgcgatgtatgccgctatcccgctgagctggctggccacggagtaattgttcgtcctgtctgccgccgcgctctgcggcggtatgttgaggtttctatgcgcgtactgattaaaaatggcctcgtcgtcaacgccgacggacagctaaagcaggacctgctcattgaagatggcctcgtcaagcgccttgccagttctattgaggcagaacaaccctgcgaagtgattgacgccgagggctgctacgtgatgcccggcggcgtcgacgttcatacgcatttcaatattgatgtgggtctcgcccgcagctgcgatgatttctttaccggcacccgggccgcggcctgcggcggtaccaccactattgttgatcatatgggcttcgggcccgtcggctgccacctgcgccaccagttcgaggtctatcgcggctacgccgcctataaagccgttatcgactacagttttcacggcgttatccagcacgttaaccacggcattctcgacgagatcccgatgatggtggatagcggcatcagcagctttaagctctatctgacctaccagtacaaactcagcgatgatgagatattgcaggcgatgcgccacctgcagcgcgccggcgcgctgacgacggtgcatccggaaaacgatgccgccatcgcccagcgccgggcggaatttatcaacgccggtaaaaccgcgccgcgctatcacgccctgagccgcccgctggagtgcgaggcggaagccatcgcccgaacgatcaacctcgcgcagctggcgggaaacgcgccgctgtatatcgtgcatctttccaacgccctgggcctagagtacctgcgcctcgccagaagacgccaccagccggtgtgggtggagacctgtccgcagtatctgctgctcgacgagcgctgctacgagcgcgaagacgcgcttaactatctgctcagccctcccctgcgcaacgccagcaacaacgatgcgctatggcgcggtatccatgatggagatattgacacggtcgccaccgaccactgcgcgttctctgcgcagcagcgcaggcagatctccggcggcgactttagccgctgcccgaacggcctgccgggggtggaaaaccgcctgctgctgctgttttcgcacggcgtgatgaccgggcgcatcacccctgagcgctttgtggcgctcaccagcgccaacccggcgaagctgtttggcctgtggccgcagaaggggctgctggcgcccggcgccgatggcgacgtggttatcatcgatccgcagcgtaccaccaccatccgtcatgccatgctgcacgacaacgccgactattcaccctatgaaggctttatctgtcagggcgcgattcgccagacgctctcccacggcagagtgatctttgataacggcacctttaccggcatcgccggacagggccgctttttacgccgacaacccttttccaccgctcaccaggccgtcagcggaacagaaacgtaatgagaggaagctatgagtaaaaaaattgttctcgctctcggcgggaatgcgctgggcgacgatctcgccggacagatgcaggccgtacgacacaccgcacggacgatcgtcgatcttatcgcccttggccaccaggtggtggtcactcacggcaacggtccgcaggtgggcatgatcaaccaggccttcgaggccgcggcaaaaaccgaggcccatacgcccatgctgccgatgtcggtctgcgtggccctgagccagggctacatcggctacgacctgcagaacgcgattcgtgaagaactgctaacgcgccagctggatatcccggtggcgaccttgataacccaggtggaagtggacgctaacgataaggcatttcttaatccgaccaagcccatcggctcgttcttcagcaaagaagaggccgaaaagctgagccaaaacggctacatcatgaaagaggacgccgggcgcggctaccgtcgcgtcgtcgcgtcgcccatgccggtagatattatcgagaaacaaacggtaaaagcgctgatggatgactgccacgtggtgatcaccgtcggcggcggcggcattccggtgattcgcgagggtaaccatctgcgcggcgccagcgcggttatcgataaggactgggccagcgcgaagctggcggagatgatcgacgccgacctgctgatcattctcaccgccgtagaaaaggtggcgatcaacttcggtaaacctgacgagcagtggctggataacctctccctgcgcgatgccgaacgctttatcgaagaggggcactttgccaaaggctcaatgctgccaaaagtggaagccgccgccgccttcgcccgctcagggccggggcgtaaagcgctgatcacgatgctgagcaaagccaaagaggggattgaaggaaaaacgggcaccattattagccaataagctgtacgccacgggttgccgggaacctcccggcaacatttctcctcgcagaagctcagacctccaccgcctcagccagacaatccggctggcacgcttgcctcacctggttcatcagcccccccggcgcgccgtttttcacctgcaggatctccgccagcacgctgatggcaatctcgtttggcgtctcggcgccgatgtcatagccaatcggcgcccgcagacggctgatatccgcctccgttacgccgttttcccgcatctggcggacaaaggcctgcactttccgccggctggccagcagccccagccacgccaccggctgggttatcagcctgtccagcgcctcccgatcctggttgttggtggcaatcagcacgaaatcctgcggccggaccgccatcgcctccactacgtccgtaaagctggcagcgtgcaccagccgcgccgaaagcggaaaagcgtcggggcaaaggctggcggaatagatatcgccgacgcagatgtcaaaatccacccgcgccgcggcgtgggcaaccgcgcggttgacgtgcccggcgccgaccagcagcaggcgcgggcgcaggccgtgcacgctgatgtaaaccgacatcgcgccgccgcagtcggagcccacggcgtcgctgccggtgcgcgccatgcggccgtgaaacattcgcgacgcccgttcgcgcagcgcttccagcgccgcatcgatgactttacgctccaccattccgccgccaatggtgcccacaatcgaaccgtcctcccggataagcatctgagcggagtgtcggggggtggagccccgactttcgacaatctgcgccagggcaaaggggcgattctgctcctcaagtcgtgctgcttctgcaaaaatattcataccaacctcaaaggcgatgtttacggctctatttgtttacctgcgatatttcccgggttctcagtttgagagtttacccggcgttgaaatagcgtcgcagcgacccgtatcgactatgcaatatttatacttagccgccgtttttcatcgcaaattgtgagacaggtcatttcgttagccgtaatgacgctgcaaccgggatcctacgccgaatatttcctctgtcgccgcggtaaaagaaagccgcccgctgaaatcaccgccgaacggtcggcataaattatcattctgatattcaggatctgattttgagaaatctcgccgaatgataaagcgtattgatttgagttctcatttccccgctgtggaattattcacgcattcgcgtcgagtttcgacctggttcacaaattaattattctaccgccgcggtttgaataactggtgtgattgttgctcctctttcgttatccgtcgggatgattaccaccggcaatgtcgatcttacaatgatatctaaggagagggttatgggagatataatgcgtcccgtgccgtttgaggagcttttaacgcgcattttcgacgagtaccagagtcagcggactatttttggcatccccgagcaacagttttatacgccgcaggcgcagcggtcgatcggcgtattcggcgaaagctgcgcgacgccgctcggcccggcagccgggccgcatacccagctggcgcagaacattattaccgcctggctaaccggcgggcggtttatcgagctgaaaaccgtacagatccttgaccgcctggagctggaaaagccctgcatcgatgccgaagatgagtgcttcaacaccgagtggtccaccgaatttaccctcaaaaaagcctgggatgagtacctgaaagcctggttcacgctgcatctgctggagcaggtctttccgctgggcaccgataaagagagcaagtcgtttattttcaatatgagcgtcggctacaaccttgacggtattaagcagccgccaatgcaggaatttatcgacaacatgatggacgcctccgcccatcctaaattcgcccagtaccgcgacaccctgaaccgctggctgcaaaatagaacctttatcgacagcctgccaacctgcgcgcgcaaagacgggctggacaatctggctcaacgcgtgccggccaggctggttcagggcgtcaccctctcaaccatgcacggctgcccgccggacgagatcgaagccatctgccgctatatgctgacggagaaaaatctcaatacctttgtgaagctcaacccgaccctgctcggctatccgcgcgttcgccagatcctcgacgcctgcggcttcggctatatcggccttagcgaagcgtcgtttgaccacgaccttaagatcgaccgggcgctggagatgctgacgcgcctgatggcgctggcgaaagcgcgcagcctcggctttggcgtcaagctgaccaacaccctcggcaccgtcaacaacaagggagcgctgccgggagatgaaatgtatatgtccggccgcgcgctattcccgctatcgatcaacgtagccgccctgctctcgcgggcgtttgacggcaagctgccgatctcctactccggcggcgccagccagctcaacatccgcgagattttcgacaccggcattcgccctatcaccatggccaccgacctgctgaagccgggaggatatctgcgcctgagcgagtgcatgcgcgagctggagaaagccgacggctggaacatgacgcagatcgacgtcgagcgcctcaacgcactggcggaaaaagcggtgagcatggactacacccagaaacagtggaagccggaagagcgcattgataccggcgagccgctgccgctgctggactgctacgtcgccccctgcgtgacggcctgcgccatcaagcaggatattccggagtatatccgcctgctgggcgagcatcgctacgccgacgcgctggagctgatctatcagcgcaacgcgttgccggccatcaccggtcatatctgcgaccaccagtgccagtacaactgtacgcgtctggattacgacagcgcgctcaacatccgtgagctgaaaaaagtggcgctggagaaaggctgggacgagtaccgcagccgctggcataagcccgcgggatccggctcccggcacccggtagcggtgatcggcgcaggccctgccggtctcgccgccggatacttcctcgcccgcgccgggcatccggtcacggtttttgaacgcgaagccagcgccgggggcgtggtgaagaatatcattccgcagttccgcattcccggcgagcttatccagcacgatatcgattttgtcgtcgcccacggcgtcaaaattgagtacggctgcgatccgcatctgagcgtggaaaaactgcaggcgaagggttttcgttacgtgctggtcggcaccggtaccgataaaaacagcggcgtgaagctgggcggcgataaccagaacgtgcataagtcgctgcagttcctgcgcgagtttaaccgcggcgccgagctgaacctgggcaaacgcgtggccgtggtcggcgccggcaacaccgccatggactgcgcccgcgcggcgctgcgcgtacccggcgtgcagagcgcgaccatcgtctatcgccgctcgcagcaagagatgcccgcctggcgcgaagagtacgatgaggcgctgctcgacggcgtcgacttcgagtggctatgcaacccggaacagtttaacgccgacgggacgctcgtcgtacgcgtcatgaagctcggcgagccggatgagaaaggccgccgccgcccggtggagaccgatgagattcgcaccctgcaagtcgactctctgattaccgccatcggcgagcagcaggacggcgaagcgctgtcggcaatggggatcccgctcgacccgcagggctggccggtggtcaacgccgatggcgagaccagcaaaccgaacgttttcctgatcggcgacgttcagcgcggcccctcttctatcgtctccgctatcggcaacgcgcgacgggccacggacgcgatcctggcccgggaaaatatcgccagcagctacggaaacaaagtctggaacaacgtcgatccggcgaaggtgtaccagcgtaaaggcgccatcgccgtcacgctggtggataaaaaccagcgcgaggcttttgtcgagcaggaagccagccgctgcctggagtgcaactacgtgtgcagcaagtgcgtcgacgtctgtccgaaccgcgccaatatttccgtggccgtgccgggcttccagaatcgcttccagaccctgcatctggacgcttattgcaacgaatgcggcaactgcgctcagttctgcccgtggcagggaaaaccgtataaagacaaaatcaccgtgttcagcctggagcaggattttgtcaacagcaccaatccgggcttcttcgtcgcgggcgccagcgtcaaagtgcgtcaggacgaccagacgtggcagctggaaattaacgaccgcggccagtttaacgaggtaccggcccagctggacgccatgtgccgcatcataagccatattcatcagcaccaaagctatcttctcggaggcgttgaagtatgagtatcctgatcctgaaaaatgccaccgccgcgcagatctatccggcgaaagtgtgggagaacgtcgatatcgccattgagagcgataaaattctcgccgtcggccccggcctgtgccagcgctatccacaggcgcaggtgaaagagatgcgcgggcagctggtgatgcccggcatggtctgctcccacaatcacttttattccggcctgtcccgggggattcaggccaatatcgcccccagcccggactttatctccacgctgaaaaacctgtggtggcgccttgaccgggcgctggacgaagagtcgctctactacagcgggctgatctgcgccatggaggccgtgcgcagcggctgcacggcggttgtcgatcatcatgcgtcgccccactatatcgcgggctccctgagccagctgcgcaacgccttcctcaaaatcgggctgcgcgggatgacctgcttcgaaaccaccgaccgcaactttggcagccgcgagctgcgcgacagcgttgaggagaacattcgcttcgccagagagatcgacgccgcgcgcgaaaagggcgaccagccttatctggtcgaggcccatatcggcgcccatgcgccgttcaccgtgccggatgaaggtctggcgatgctgcgtgaagcgctaaaagccaccggccgcggcctgcatatccacgcggcggaagaccgctacgatgtctctcacagccatcacctttacggcaaagacctgctggtgcggctggcggagttcgaccttatcaacagtaagacgctgattgcccacggcctgtacatctccgatgccgacgtcgagctgctcaacgcgcaggacggcttcctggtgcacaacgcccgctccaacatgaacaaccacgtcggctacaacccccgcctgccgcagatgcgcaatctggcgctcggcaccgacggcatcggttccgacatgttcgaggagatgaagtttgccttctttaaacaccgcgacgccggcgggccgctgtggccggacagcttcgcgaaggcgctgagcaacggcaatgaactgttgaatcgcaacttcaacgcccgctttggccgccttgaggcgggctataaagcggacctcaccatttgcgactatatggcgccgacgccgcttatcgcggaaaacatcgccggacatatcgccttcggtctgggggcaaacagcgtgcgcagcgtcatggtgaacggcgtgatgatctacgaggatcgccagttcagcttcgactgcgagccgatattccgcgaagcgcagaaagtggcgaaaaaaatgtgggcgcgaatggatgcgctccccgcgtagcccgcgtaaaaacgctaaaccggcctggcaggccggttttttttgctgacagaacgcgggcgtatgaaattgcccggcagcttccgcgccgccgggcgcgaggtttacagcgacagcagcgcggcggtggcgatattgcgctgcttttgcagcgcgctgagctgctcttcggtcatgatactcagcgccgccgtcgggcagacatcaacgcaggcggggccgcgctcccgggtgccgcaaagatcgcacttaacgataaccggcgtcacaccggcctccacctcaatggtaatcgccccaaacgggcaggcgaccacgcagctctggcagccaatgcagcgcccgccgtcggcctccactttctccgcccccatgctcagcgccccggtcgggcaggcgcccacgcagggcgcattctcgcactgatgacacatcaccggcacgctaagctcgtcgaggcgcatcaccttcaggcggggatgaaactccgcccccggcgccacgtgttccagcgcacaggctacctcacaggtcctgcagccgatgcaggcctgcgaactggcaacgataaaacgagtcatatctcctcccgggccgtgaattgcatcaacatctcgctggccgcctgccgcccggcgaccatggcggtaaccaccaggtccgcgccggtcacggcatcgccgccggcaaagattttgtcatggctggtttgcgtcgttccgcgccctttgccgccggtcactatctgcccccagcggtccagctttatcccgtggccgcgcagccacggcatctcgtgagcctgaaagccaaacgccataatgagcacatcggctttaagttcaaacccggaatccgggatcggctgcggccggcggcggccgtccgggcccggctcgcccatcttcgtgcggatcatctccaccgcgcagacctgccccttgcggttgagctgaatgcgctgcggctgcacgttaaactcaaatttcaccccctcttcccgcgcgttcaccacctcttttttcgatccgggcatgctcagctcatcgcgacggtaggcgcaggtcacgctcgctgcgccgcggcgaacggcggtgcgcaggcagtccatcgccgtatctcccccgccaagcaccaccacccgtttccccttaatgtcggtcaggggatactcggggctctcttcgagccccatcacctcgcgggtgctggcaatcaggaacggcagggcctgaatcacgccgggggcgttctctccctccaggccggcggccatcagaccgtaggtgcccacgccaaggaagacggcgtcatagtttttcaccagatcggcaaaagccacgtcgcgccccacctcctggttgagatgaaaattgacgcccatggcgctaaaaatgtcgcgtcgcttctcaagcacgtttttatccagcttgaacggcggaataccgaaggtcagcaggccgccgatttccggatggcgatcgaacacgtcaacgtgcacgcccgcgcgcacgagaatatcggcgcagcccagtccggcgggcccggcgccaatcaccgccacccgctccgggcgcggggctactttgccgattgtcggtcgccagcccatcgccagcgcggtatcggtgatatagcgctcaaggttgccaatggcgaccgagccgccttcgttctttaaggtgcaggccccttcgcacagcctgtcctgcggacagacgcggccgcaaatctccggcagggaactgctctgatggcacagctccgccgcctcgataatcttgccctcgctcaccaggcggatgaaatcgggaatatgattatgtaaaggacaggtccagttgcaccacgctttctgcgcgcagtagagacagcgttcgctctcatactccgcatcgcactcgctcagcggctgatagatttcgccgaagtgctgcatgcggtcatcggcgggcacttttttcgcgcccacccgcggaggtttattgagtatcgcgctgcgtctggcgccgcgaacggcgcccagcggggtttccagcgcggagcgaatctgccgcgcgctacgcagccggttaacggcggcctcatccatcagttgcagcgcctgggttggacagctggccacgcacgcctgctgaccggaaggatgctggctgcaaagatcgcatttctgcgccagctgcggcgcgtcgtcatcgttggccaccatctcaatggctccaaagggacaggcgatgacgcagtttttacagccgatgcacagcgcctctgtaaactgaacgctgtcgttcgccacgcgcagcgcctgggtcggacaggcgccgacgcagggcgcgtcgttgcagtggcggcaggtcgtcgcgctgctggcgtggcggtggaagaacacccgaatgcgcggcagaaagtcgctgcgctgccggggccagctgtcctggcgatgagaggtgacgcaggccacttcacaggcgtggcagccaatacagtttgcagaatcggcaacaataaatttattcatttgcttccctttattattccaggactcaccgggaagcaatgcaataatcaggcgcttttgttcagggtattcatatggtgcttatttttgcgagccgtctcaaaaaaaacaggcccactcccgctaagcggcgcgatatatatccgctctcgctgaacaaaaattattctccgcgctcagggtttaatcatgttgataattcaacgtatcgcgcgtgataccaaaatgagacgctccctgtctcaatgtgatagcgcgcgtttattcaccacgagatttatttgagaagtttcgcagcgcgtcgatattcccgcctttttctcgtgagttatttcacacaattctccttcaatcctccaggcgcttatttttggcacagcttacgcatattacttctcgtgcgcgcaacacgctgatgaacgcatcggctcagggaggcagcggccttcgaatcgtaacttcggctctgttcatgtttatacagagtgaagtcgtacaggagataacaacttcatgaaagatatcgccaattccgcctcacataacgggaactcgaccgcaccggtcgatgaaatattacccgttacgcaaatgattctttatgggctacagcacgtgctggtgatgtacgcgggcgccgtggcggttccgctcgttgtgggtaatgcggtagggctcccgccggagcacattattttactgatcagcgccgacctgtttatctgcggcgcggccaccatcgtgcagtcgctgggggtcggtaagtggctcggctgtcggctgccgcttatccagggctgtaccttcgccgcgctgatcccgatggtgttgatcggtaaggagtacgggatcggcggtatttccggggcggtgatcgtgtccggtatttttatcctctgctgcgcgccgtggattagcaagctcatccgcttctttcccaaggtggtgatgggcagcatcgtcacgcttatcggcatgtctattatgccggtggcaggcgggtggattggcggcgggagcagcgaaatgagcggctttggcgcccccttctcgctgctgatggcggcaatcacgctggtgattattctcaatatttacacctttgcctccggcgtcgtgaaaaacacgtcggtgctgatcggtcttatcatcggcaccgtactctggagctgctttaagcctctcgactttagcctcgtccacgccacaccctggctccatctgccgaccctgatgcccttcgccaaacctgaatttcatattatccccgtcgccctgctgtcgatggtgatggtggtggtgatggtggaaaccatgtcctcgatgatggccaccggggatattgtcgggaaaaaggtggacgcgaagatgctgcgcaacggcctcaacacctgcggtatcgcgaccactatctgcggcttcttcaatctgtttccctacgccgccttcgcgcagaacgtcggcctgatcggtttaaccggggtgcgcagccgttttgtggtgtcggtctccggcatcattctgattctgatgggtgtgttctcgaggatggcggcgctggtggtgctgataccgaaaccgatcctcggcggcgcgggcattgtcatgttcggtatggtggcggtgtccggtattcgtaccctgggacaggtcaactaccgcaacaataataacggtatggtggtggcattaacgctcggcctcggcatgatgccggtgctggtgcccaatctgtttacccagtttccgccgatggttcagctgtttctgcacagcgggattacgattggcaccctgacggctatcgtcgccaacctcaccctcaacggcagcgtgccattccgcgttaaccacgaaacgccggtccccgatccggccccgccaagctcggcggcgcgcaacatggccgtcagaaccgtcagaatgtggctcctgctgcgcaaagttcagaaggagagacagcctgaagaagcgcaggaggggtaatgatgctcaccagactcctgtttgccttgatcaccctgctgctgctggcgatacccatcgtgcagcagggtatcgcgcagggcctgaacggccgttttagctatgccctgctgttctaagtttaaggaccactgctatgaaaaaagtcacgaccgtctgcccctactgcgcctccggctgcaaaatgcagctcacggtagaagagggaaaaattacccgcgccgacgctgcgatggggaaaaataatcagggcaccctgtgcctgaagggctactacggctgggattttattgacgacccgcagatcctcaccccgcgcctgaaaaccccgatgatccgccgccggcgcggcggtaagctggagtccgtctcctgggaggaagcgctcgattacgtggcaaaccgcctcagcgacataaaagcgaagtacgggccggatgcgattcagaccaccggatcttcgcgcgccaccggcaatgaaaccaactacatcatgcaaaaatttgcgcgcgccgttattggtaccaataacgtcgactgctgcgcacgcgtctgacacggcccttcggttgcaggtctgcaccagtcggtcggcaacggcgcgatgagtaatgccatcaccgagatcgataataccgatctggtgtttattttcggctataacccggcggattcgcacccgatcgtggcgaatcacatcctcaatgccaaacgcaacggggccaaaatcatcgtctgcgatccgcgtaaaatcgaaaccgcgcgcatcgccgacctgcatctggcgctgaaaaacggctccaacattgcgctgctcaacgccatcgggcaggtgattatcgaagaagatctctacgataaatccttcgtcgccgggcgttccgaaggcttcgaagcgtatcgcaacatcgtcgaaggctatacgccggagtcggtggaagccatcaccggcatcagcgccaggcagattcgcgaatgcgcgcggctgtacgccagcgccggaaacgccatgattctgtgggggatgggcgtaacccagttctggcagggcgtcgaaacggtgcgttccctgaccagcctggcgatcctcaccggcaacctggggaaaccgcacgtcggcgtcaatccggtgcgcggccagaacaacgtccagggcgcctgcgatatgggcgcgctgccggacacctatcccggctatcagtacgtgaaattcccggaaaaccgggagaagttcgccaacgcctggggcgttgagagcctgccggagaaccctggctaccgcatcagcgagctgccgcaccgcgtggcgcacggcgaagtgcgggcggcttacattatgggggaagatccgctccagaccgacgccgagctttccgccgtacgtcaggccttcgaagagatggagctggttatcgtccaggatatctttatgaccaaaaccgccgcggcggccgatgtgattctgccctcgacctcgtggggcgagcatgagggcgtctataccgcagcggatcgcggcttccagcgctttttcaaggcggtggagccgaagtgggatctgaagaccgactggcaaatcatctgcgaaatcgccacccggatggggtatccaatgaagtacgacaacacgcagcagatctgggatgaactccgccatctgtgccccaacttcttcggcgcgacctacgagaagatgggagaactgggctacgtgcagtggccgtgccgcgacgagtcggaggcggaccagggcacttcgtatctgtttgcggaacggttctccacgccgaacgggctggcgcagttcttcacctgcgaatggcaggcgccggtcgataagctgagcgatgcctatccgctggtgctctccacggtgcgcgaggtgggccactactcctgccgttcgatgaccggcaactgcgctgcgctggccaaactggcggacgaaccgggctacatccagatcaacaccgccgacgccaaacggctcggcattgaggacgaagagctggtgtgggttaactcgcgcaaaggcaaggtgatctcccgggcgaaaatcagcgacaggccgaataaaggggcggtctacatgacctatcagtggtggattggcgcctgcaacgagctggtcaccgagaatctcagcccgataaccaaaaccccggagtacaagtactgcgccgttaacgttgagcgtattgccgatcagcgagccgccgaacggtacgtcagtgaggaatacagccagttgaaagcccgtctgcgcgaaagcgccgcggggtaaaaaatatcgccccggcgctgtgcgctccggggcgatattgtcttttcttcttccctccgccagcgctaaccgacggcggccagatctttgcggcagcggcgcgcgacctcaagatactgctgcggagtgtcaacatcccagtgaatcccctgattcgccacggggataacgcgcgccgccatctgaccgataacgtcccgcagggtggccccttgcggcgcgcgacgaatcagagaaatcgcccgctggggcagaagaaccggatggcctttaccgcgatcgtaggccggtataatgcagctcccggcgtcggcgttggcccacagccggcggtagacgcccggcgtgacctccggcatatcgcccagcgccagaaagaaacgcgaagcgcgaatatggcctaccccgcactgaatagaagagaacataccgtcctgatattgcgggttaaagaccacctcaacgcccggatgatcccgatagcacgcggccagttcgtcgccgcgaaaccccgtcaccagcaccacccgatcgcagaacgccagggcgctggcaagggcgctatcgagaatcgttccctcgccccacggcatcatcattttccatttgcccatccggctggagagcccggcggccagcataacgcactgtttatccttttttttgctcatcgtcatcctccccctgaagccgaatacaacgccgccgtcggctggcgacggcggcgcttgcggcgatcaggatttcagcaccgctttaatcgaggtaatgatcggctgatatcccgtacagcggcagatattcccctccagcgcctctttcagctcatcgtcgctgggggccgggttggcatccagcagcgccttggcgctcatcaacacgccgggcgtgcagaagccgcactgaacgccgccgtgacgaataaaggcgttctgcaattttttaccgaccggatcgtgatgcagcgcttcgacggtagtgacctccgccccgttgcactgggcggccagcagcaggcaggagcagacggatttgccgtccataatcacggtgcaggctccgcactcgcccaccgagcagccctctttggtgccggtgagcttcagctcctcgcgcagaaaatcgatcaggcggacattgtctttcacatcgcgggcaatgcggatgccattcacttttagctcaatatggttcatgttcatggctccttattttttctgctctgtcataacttcctgcagcatctgccggaacatatcgataaatacggggactttataaggcgcagaccagcgtccgccgatggctttttctaccttgtcgtgcagtaccccggccgcatagtcaatggcggcggcgtctaacgccttcccggtgagcgcctgctcaacctcagtcaaccgctgcggtttggccatcagcgcgccatccaccagacggcacaggcgaaccacgcccttatcgaccataaactgcccggttaagctctggcgcgtaatgttcaacgcattgcgccggccaagctgcagatagcgattgatcagcggctgctgcgtcggcgccggcaggataaagcggacaaccagctcatcgggctcaagaagggtgcgatagccgcccacgacaaattcgctgaccggcatccggcgcgttccgcgcgcgctgcgcagctctacttccgcatcgtagataatgagcggcggcatggagtccgcgcacggggcggcgttgacgatattgccgccgatcgttgcccggttgcgcagctgcagggagccgacggttttacaggccgtaaccagtagcggatagcgctgctgaatcaacggatgcttaaccaggtcggtaaagcagacgccggagccaatggagatcccgccctcaacgtcaaaaatctctttcagctccgccagtccggcaatgttgacaagcggcacctcgccggacagcatccgggcctgcaccagcacatcggtgccgccggcaataggcattgcccccttcccgtccatcagcgtcagggcctctttcagggtttgcgggacgctcagcgacagggtgttgaggcggtgaacctgtttcttatcgccagactccagcatctgctcgctctggcgctccggcttcttgaggttataacccaggcgaacctgctcgagggtcagcggcagggtccggttggggcggtcgatggcgaagctcaccgcgttattgagagccgcagcgcccagttcaagtaccggttcgccgataactttcgcccccatcgggcccgctttatcgtagttttccaccgcaatgatatcgatgtgcggcatatccttgatggtcggcagcagataggtatcgaagttttccgatttcaccacgccgtgctcggtgttgaaatcctcgagcatgccgtagccgatcatcccctgcagcacgccgccgtagacctggccgctaaaaccaaccgggttaatgactttaccgacatcgtgggtggcgacgacgttattgacggtgattttgccggtgcgcatatccaccgccacgtcggccagctggcagccgtacacccaggtgaaataggggctgccgcagcccttctcttcatcccagtgaatattcggcgccacgtgccagccgtaggcggagaggtttgccccggtagcccgggtcatatcgcacacctgctggaagctgaggctcagctccgggctgtggcggttgaacaccttgccattttgccaggcgatatcgtcgatgctctgcgctttcagcgtttccctgacggcgtccgccatgcgttgtttaattttgttcgccgcgctcagaatcgcctgtccgcccatcagggtaccgcgcgaagcgaccgttgagccgccgtcggcgatcatcgcggtggccggttcgctaaacatcacccggtcgagcccaataccaaaggcttccgccgccagcagcgacatggtggtctgcagcccctgcccgttctcggataccgaggtggagatgttcacgctggcgtcggcattcacctgaatcagcgccgaggacgcatccagcccctcggcccccagagagcagccgcgatggctcagcgcgaagccaatcccgtagcggatcgggccgccttccgcgttaagctttttgtagtgctcgcgtttggcctcgtattcggccttgagcagcgtcttctccagcacctcccgcgcggagacggtatgctcgctgaagacctgcccggccatgctggtatcgccctgcttgagaatattgcgcaggcggaactcaacgggcgacaggcccagttcgcccgccacgtcatccatcagcgattcgttggcgaaaatgacctgcggcgcgccgtagccgcggtaggccgaggtatagttgttgttggtgtaaacgcccaccagatcgacgcgtacgttagggatgttgtaggggcccgccgcctgcacggaactgcgccaggtgacaaacaccgtctggccgcagtagctgccgccatcggcgataatgtcgattttaatcgcctgaatgcgcgcgtcgtcgtccacgccaatgcggtatttcatcttataaggatggcgcttgtagctctcgcgcatcgactgttcgcggttataagagatcttaaccggccgcccggtcaggtgcaccagcagcgccgcgcggcaggagacgttatcgataatgtcatctttaccgccgaaggagccgccgaggacggagcgcttaatgttgaccttcgcctggggcaggtcgagatatttggcaatcaccgcccgggtgcggtgagcgttctgaatcgacccttcgatggtcatgatctgttcattattgtccaggtaggcggtaatcgattccggctcaatatagccgtgctcctggaaccccacctcatactcacgttcgaagatatggctggaggcggcaaaaccggcatcaatatcgcccttcgccgtgtggtggcgattgatgatattgctatcgagttcgctgtgaataaggcgcgccccgggcttcatcgcctcttccggggaggtaatcggctcccacggggtgtaggtgattttgattttatcgacggcgatgcaggctgcctcgtaggtttccgccgccactacggcaaccacgtcgccgcggtaggcgatctccttgtcgataatcggcggatgatcgggaacaatcgctcccagcttgcgctgaccggggatatcgttccaggtggcaatacgcacgacgccgggcactttttccgcctccgacaggtcgagcgcatcgatgcgcccggcaggaatatccacgtagcgacaaacgccatacagcatattgttcataataatgtcatcgccgtagaccgctttacccgtcaccttggcgagcccgtctacgcggggcacctcactgccaactagcaatgtatccatatttttcagtctccactcacaaagaaagataacggattaaagcaatggctatgccacctataaataaagggttatttgaggctgagttatgtgaggcgtatctaaaaatagcggccggttaaagaataaaaagcgcatgaggtcgccgctgattatcaaaacgagagcatgcgtatcactatgataattggcggttctcaattgtgtttccagggtgacgccagcggtgcatccgcagctcctgccgccgccgggcattgagcgcaaccgtcaccctgcggcaaaacgcgtatcgaggtgatgaagctttttgacgccccccgatttcgaataaaaaataaaacagacgcaataatgaaatttaaatttcataaatgaacatgttaacaaatgtgatatatatcataattttaacaattcattttcctgccaccgggccacccccccgtaaacaatcctaaaaattgccatatatatcaattaattataaaaatagccattctatacacaaggctgttacacatgacccacaaaaccaaaccgaaataaaactttcaaaatgtgatctgtttgtatttttatttcacttatagcggtaataatcatctctcactaaacgcactctgcccgccttgatggcgcagcagaaatcctaaccccccggaggatgcaatgaaggaagtgagatcaggacttatccgaaccgtttatattggcccgccccttttccaccctcacgctaccggggactttctgaacgtcaaccaccccggaggccccagccccgcatctaccgatgattcatcattaatcaaaaagaaacctctttgatcggttttatttagcgcatagcaatcgcgctaaatagttgcactaagaacaaaaaaacatttcatcccggccgtgcttcgccaggcgcaaaggcatgccgtgacggggatgggatgacacgtttttatctcgtgccgttaatcaaaacaaaaggtataaaaatgtctcttattatgaatctgaacctacagcagagaaaacgattacaccagataaccctggttgcgacatttggcggcctgctattcggttatgacaccggcgttattaatggcgcattttcctctctgaaacaatatatggccctgaccccgactaccgaaggtctggtcatgagcgtattgctgatcggcgccgcgttaggtagcgtattcgggggaaaattcgcggacttctttggcagaagaaagtacctgctctttttatccttcatctttttcatcggcgcattaatgtccgctctggcgccggatatcaccgtactgcttatttcacgtttcatcctcggctatgccgtgggtggcgcctcggtgaccgcccccacctttatttccgaagtggcgccaaccgaaatgcgcggtaaactgaccggcttaaacgaagtcgccattgttatcgggcagctcgccgcatttgccatcaacgccattattggcatcctctggggccatctccccgacgtctggcgctatatgctgatggtgcagaccattcccgccatctgcctgtttatcggtatgctgcgatcgccggaaagcccgcgctggctgatcagtaaaaaccgtcatgaagaagcgctggaaatattaaagcaaatccgccctctggaacgcgcaaccaaagaattcaacgatatcaccaccttaattaaggccgaagcggacaaaaagcttcatgcgcagaacgcctttgtcaccattctccagacgccatggattttcaaactcctgctggtgggcgtcatttgggcggcgctgcagcagaccaccggggtcaacgtcattatgtactacggtactgagatcctcagcagcgccggattctcagaaagaacctccctcatctgcaacgtactcaatggcgtgttctccgtcggcggcatgctatttggcgtgctgtacctcgtcgatcgttttaaacgtaaaaccatcattatttatggtttcgcgatcatggctaccctgcaccttatcattgccggcgtagactacacgctggtcggcgacatcaaagccacggccatctggctgctcggcgcgatgttcgttggcgttatgcagggaacgatgggctttatcacctgggtggtgctggctgagctgttcccgctcaagttccgcggactgtcgatgggcatatcggtatttttcatgtgggtgatgaacgccatcgtcagctatctgttcccattattgcaggccaagctcgggttaggtccggtattcctgatttttgccgcgattaactacctggcgattgtttttgtcatcgcggcgctgcctgaaacgtccaataaatcgctggagcagctggaagaggagctttcagcaaataaatctgcagcgggattcaatacggccactaaggaaaacggattatgatcgatactattacgcaggataatctccatctgtcgtgccgggcgaaaaataaagcagaagtcctggccatgattggcgcggactttaagtccagagggtacgtcagcgaagattgcgtggcgtttcttgctgaaagagagcgtcaggtctccacctttttaggcaatggcattacgctgccgcacctgcctaaatcagccaccagcatcattgtcaaaacgggggtggagatttatcaattccctgacggcgtgatctgggacagaaataacgtcatgtttattgccattggcgtgattgctaaagagagcgagcacatcgatgtgctgagagaggtggcgtcgatctttagcgatgaagtcatcgccagagcgctgtcgttgattgctaataaagaggattttttaaggatcctccagcagaatcactaagcacggctatctcccgatagtcgcccgatgaaagcctgcttgcgcgcaggctttttgcttattcaggatggacgtagcgattagctgcctttataggtggagtaaccatactggctgagcagcagtggaatatgcagcttttcattggtgcgcgtgacggtgaagagaaccgggatctcggggaaaaacgaggccagtttctgtttgctgaagtcatcgccggttttgaaggtcactttataaatccccggctgcatatccccttcagctggatagagcgatttaatacgaccatcgttgtcggtgacgccggtggccagcgctgtccatttattcgcctgctgtttttcaagggtgaccgtcacgcccgatgaaggcagacccgtctgctgattgagaatatgtacgctgagcgtcccgacgggggcgctaaatgcggctggagccacagacatagcagataacagaatcagactggataattttttcacgatgttttcccgttgtgaataataacgttcaaacgttagcacctgggctgctaaaatatattcaactttttgtgataatcgccttaacggaagcaggacgaggaaaatagcgagcagggcaacagcccattcgaagtgatagaattatctgaatataaggtgcatcgctggggcgtgaataaaggcccgcgcgcttgcgctatacttattttcctccgcgttcacaaaaggaattcatatgaagatatggccagttctgacgggtgtggctatcgccctgacgcttgtcgcctgtaaatcccccactccgcccaagggggtccagccgataaataactttgacgcaagccgttatctggggaaatggtatgaggttgcccggctcgaaaatcgttttgaacgcggcctggagcgggttaccgcaacgtatggtcagcgcagcgatggcggtatcagcgtggttaaccgcggttacgatccgcggaaacagaaatggagcgagagcgaaggtaaagcgtattttaccgcggcgccaaccaccgccgcgctgaaagtctccttctttggcccgttttacggcggctacaacgtgatcgccctggatagccagtatcagtatgcgctggtcagcggtcccgatcgcggctatctgtggatcctgtcgcgcacgccgaccatcccggaatccattaagcaggagtatctgcgcatcgcgcgggatctcggcttcccggtagaaaaattagtctgggtgaaccacgggtaacaggctgaatccacactatcttcagcgaaccaacgagctgaagatagtgtggcgataaggctggaagaggataaataattagtgcgatgacggctggctggagtcggccgcctcttctgcggttttagcgggagcgatactctctttaatctctttggttttattcgccgcatcgttggccaggttattggcatcaacaatcgcgctgtctttaatttttcccgcttcctgcacgatttggtcgcttttctgccgggcatcctgcttaacggcatcagcctgggcctgggcttgctgagcgatagcttccgcttttttatccgcttccgccttgatgctggaggcctggctgctgagattgttcgcctcgtccgccgcctgtttttttatcgcatcaatgtgtttatccgcttcatccttaattgcttcggctttatcggacgccgcctctttaatttgctgcgcgttatcttttgctttatccagatttgcatcaacttttgatgaatcgtcacagccggcgagaattaaacaaacggcagaagcgatcagcgttttactccagagtttcatagtcattcctttatttattaatatcagcgtatcggggaagtcatcaccgcagggttgccaggataattctcataacaatgatgtcatgaaattatttagccccaatacttagccctgcatccctttatttataatcgctaaccaggcagagtcaagttcctgcgccactcccccggcgagggctgacgtaaaaaacccgggcggctgcccgggttggtcactgaaaaaagagtttaggcggtgacggctgattttgtcagcgttgggccggctaacgccagccgggcgccggcatcggtatcggtatattgcttaaagttgtccataaacagttgcgccagactctcggccttctcctgccatttgtcggcagaaggccagccgctacgcgggtcaagcagcgcgctgtccacgccaggcacgctttgcgggatagcgagaccgaataccggtaccgtttcttcgcgcagctcgccggtggtcccgtttaaaatcgcgctgatgatattgcgcgtgtcgcgcagcgaaaggcgcttgccttcgccgttccagccggtgttaaccagccaggcctcggcgccggcctccgccattttggccgccagaacgctggcgtactgcgtcgggtgcagcagcaggaacgccgcgccgtagcaggcggagaacgttggcgtgggctgagtaatgccgcgttcggtaccggccagcttcgaggtaaagccggacaggaagtgatactgcatctgctcggtcgtcagacgggataccggcggcaggacgccaaaggcatcggcggcaaggaaaatcaccttcgacggatggcccgcacgcgacaccggtttcacgatgttttcaatatgcgatagcggataagagacacgggtattttcggtcttgctgccatcggcgtaatccacgctgccatcggctctgaccaccacgttttccagcagcgcgttacgacgaatcgcgcgatagatttccggctcggcctgcgggtcaagattaatcgtcttggcatagcagccgccttcgaagttgaacacgccgtcatcatcccagccgtgttcgtcatcaccgatcagctgacgcagcggatcggtggaaagcgtggtcttaccggtgccggaaagaccgaagaacagggccacgtcccccgcttcaccgcggttcgccgagcagtgcattgaggcgatgccctgctgcgggagcaggtagttcatcaccgagaagaggccttttttcatctcaccgccgtaccaggtgccgccgatcagctgaattttttcgctcaggttaaacgcgacaaagttctcggagttgagcccctgctcctgccatttatcgttggtgcagcccgcgccgttgaggacgacgaagtccggcgtaaattcagccagctcctctgcgctcggcgcaataaacatgtttttgacaaagtgcgcctgccaggccacttcggtgacgaagcggacgcccaggcgcgttgccgggctggcgccgcaccacgcatcaacgacatataatttcttgccgctcagctgtccggcgaccagcgccttcagatctgcccatatctcggtggatagcggcttattgtcgttgcggccaaggccggaatcggcccaccagacggtgtcacgcgtcagatcgtccctgacaatatatttgtcgcgcggcgagcgcccggtaaagatcccggtatccacggcaacggccccggactcggtcatgacgccgcgcgccgcgccggttaattccgggctggtttcatgcgcaatcagcaagtcgtaatcggggttataaaacagctcgctgctctcctgaataccgagcgaaagaagagcgtcttttactgattcaatacgtgacatggcactcctgacaaactattggctggataagatgctattagggtatttcaacctgtcagctaagcggatggatttattttaataaaaaaaccatcgtgaaattaaataaacaggatgaacagaccagagccggcgatgtaaaatcgtgctcgtgtagggtgtcgcctgaactttagaaatatcgtttgcacgaataagtcataagctaactctgcaaaaaatgttaacacctgtagataattatgttaattgcatagtttctatacgtcatgctaaaattgcatagctattattgcagggcagaggaacggatcggtgctggcgaatcttgaagtaaaatggctttacgatgtgattgcccttgaggaatccagaagctttaccctggcggcaaaaagccgcaatatttcccagtcctccttcagccgccgcatccaggcgctcgaggcgtcgctgggcttcagcatcttcgaccgttcggcaaacccgctgcagctgaccaaccgcgggaagatttttgtcggctatgcgcgaaatatgctcgacgacatggacttccagattagccgaattaaagggctgaacaacaccacccagaaaataagaatcgacgcggcgccgtcgctttcagttttattacttccggaaatcatcgccggttataccgaccgaaagaataaaacttttcatgttgaatcgattaacgtcaacgatgcggtgttcaacctgaaagaaggcaaaagtgattttatcctgtcattttataatgaagagctgatgaactatccgtttatcaatcacaaaatttttgactcggcgctgcacctcgtttctccctgcgataaacacggcaggccgctttttcatttacaccgcggggtgctgccgctgatgaaatacgccaacgacagctatatggggcgccaggtgaatcaggtgatcgaccgcaagccggagatcaccttctcgctgacctttgtctcctcgatgagcgagctgttaaaacgcatgatcctcaacggcgacggcgtgggctggctgccgcagtactctatcaagcgcgagcttgaggagggccgcctgacgattatggatgagagcctgtcgctgccgatcggcgcctatatttaccgctccggcgcgcggctcaaccagtcagccgagcgcttctggcagcatattaagtctatgaataccgtgaccgcataactcgcatggcggcgggaaattcgctatcatccgcatccacttcctctccgtgcagcctgatgtctacgattatcgatacctttatcgccccgccgtgccacgctgaaatcgacatcctctacgaggatgaccatctgctgctgatcgataaaccctcaggcctgctgagtctgtcggggaaaaatccgcgtaatctcgactcggtgcattatcggctggtacagcggtttcccggctgcactctggcgcatcgtcttgatttcggcacctccggactgatggtgattgcgcgcaacaaggccatcaacgccgcgctctgccagcagttcagccagcgtgcggtgagcaaagtctacagcgcgctgctgtgcgggcatctggcggatgatgaaggaaccgttgacgctccgatagccaaagatccggcgctgtttccgctgatgacgatttgcccgcgccgcggcaagcctgcccgctccggctatcgggtggttgagcgcctgcgctatcaaggtagcgtgccggtgacgcgggtccagctgacgccggaaaccggccgcacccatcagctgcgtatccactgccagtggcttggccaccctattctgggctgcgatctgtacggcggtctgttgcttccgggaacagaacaggcgccgcgcctgatgctgcacgccagcgaactgcatttcgtgcatccggttagcggagagcggatcgatgcgataagccccagcgggttttaactcgcccgctcgccagcccttttaccgaatctctcccgcacgctgattgacgtcgacgctttaattcgaatcgcggcattgcaaatgcaaatatcatatttgctcgttaatcaccgcctctgtagcttgtgctctattcatgcttttcatgaaagaacattcagggcgcaacggctttatgattaaactcgataatattcgcaagacctaccccggcagcgcgcatgcggctattcgcggccttaatctggtgattaatagcggcgaactgtgcactttcgttggccccagcgggtgcggaaaaacaaccattctgcggatgattaatcagctggatattcctgacgccggtgacgtatacgttcagggcgttaagcttgccgctgccgatattattcaggtgcgccgccaaattggctttgtcatgcaaagcgccgccctctttccgcatcgtactgtcgcgcaaaatatagccacggttccgcgccttctcggctggagcaaaaagcatatccaggcgcgcatcgacgaattagtggatttgatgtctctcgaccgcaacgtcctgccccgctatccgcaccagctttccggcggccagcaggggcgcgtggcgatcgccagagcgctggccgccgatccgcctattctcctgatggacgaacctttcgccgccatcgacccggtggttcgcgagcgcctgcaggacgagctgctgttgctgcaacagcgcctgcgcaaaacgatcgtcctggtgacccatgatatcaatgaagctattcgccttggcgatagaatcgctatcttccaggagggcggcgagctggcgcagttcgccacgcctgaccatattttgtcgcatccggccagcgactttgtgcgccgttttatcggccccgaaccgaatctgcagcggctggggagaattcaggtcggacagctcccgcgccatgacgtgccgcttattgatgagagcctctcccccatcgccagcccgcatccgccggtcgccagtccgctgcgcctggtgctggacaaaaaacggcgtccgctgaactggttcgatccggtaaagcgccggacgctgccggtcgacgcgccgctggcggccatcaacacgctgcgctttgcctacagcgcgctgctggatgcgcccggcggcgtagtggttcatgtcgataccgacggtgaatatcagggcagcatctcccacgctctgctgcagaacgtgctggaaggccacgtggatcttcgccgctatgattgactggccgtggatcctcgacaacaaaatcatgatcggtgaactgctctggcagcatgtacagctggtgatcgttgcgctgtttttcggcaccctcttcaccggcgtattgattagcctgacgctgcgctggcccgcggccgcccagccgctgatctacctgtgcgggatactgttcaccatcccgtctctggcgctgtttattctattactgccgtttaccggactgtcgctgatgacctcaatcatcggcctgacgctctactcgctgctgatcctgctgcgcaacgttatcgccggaatagagaaactcccggcgacggtgctggagtcggcgcgcgcgctgggctatacccgctggtttcgttttgtcgatatagagctgcatctgctgctgccctcgctgttcgccgggttacgcatcgcttcggtgacgctggtcgggctggtgacggtcaccgccttaattggccagggcggtctcgggcagcttctgttagccgggtttaaccagaattttgtcacgcctatcgcggtcagcctggtgctcagcgttgtgctatctctgctgttggattcgctgattgcccgcgtcggctattggctaacgccgtgggcccgctaatggatatcctgcaagcaacatttcactggttattacaaccgcagcactggacaggcgacgcgggaatattacttcgcctgcgcgagcatctttattatgtgctgattagcatcgtcgttgcctcggcgattgcgctgccgctggggattattctcggctactggcgcaagggcgcgtttgtgattattaatctgtttaatattggtcgcgccattccctctttaggtttaattcttttatgcattattgtgtttggctttaatgatattccggtctttaccgcgctggtggcgatgtcgattccgccgatcctcaccaacgcctgggttggcatttatcatgccgaccgtcagctgtgcgatgcggcaaaagcgctgggcatgacgccactccagagcctgtggcagctgcggataccgctcgccgcgccgctgatactcgccggcctgcggaccgcgctggtacagctgatcgcgaccgccgtcgtcgccgcctacgccggccttggcggcctcgggcgttttctgatcgacggacttggccagcgcgatattccccaggtcattgccggttcgctggtggtatcgctgctggccatcggctgcgagctgcttttttcattactctcccggcgcatcgttccggcgccggtcacgcaaataaattaatttcccaacaacaaaaaaccacctgcaggtaaagaggtattatgaagcagctatttagcatttccgcgtatcgtcgccgcttgcgtctttcggtattcaccgcgggattattaagcttaagttttaacgccctggcgcaggacgtcaccattggcggagcgaatttcaccgaaagttcaatccttgccaatatttacgccagcgcgctaaagaaaaacgatattgcggtgaaaacccgtcttaatctcggcaatcgcgagattattattccggcgttgcagagcggcgaaattgatattgttccggaatatctcggtgccctgctgaactattatgacggcaaaacgctggctaccagccagagcgacgttagcgctgagttagccaaagcgctgccggcggactttacgctacttaccccctccccggcctcgtccattaccgcctgggccgtgcgcacggaaacggcaaaaaaatatcacctcagcaagctttccgacctgcagcccgtggcccatcagctgactatcggcggcccgccggaattcccggtgcgcgccctgggcctgccgggccttaagcgcgtctacgggcttgaatttaaggcggtgaaatctctggatatgggcgggccgctgacccgtctggcgctgaactccggcaaaatcgacgtcgccacggtcgtctccactcagggcaacctcgcgaaagaggattgggtggtcctggaggatgataagcatgagcagccgagccagaacgtggtgccgctggtacgcaaagccagcctgacgccgaaaatcagcgaagtgctcaatgaggtctccggcaagctgaacaacgccgcgctgatcgaacttaaccagcaggtcgatctgcagcataaagatccggcggcggtggccgaacagtgggtcaaaacgcacctcaacggcaactgattgccgccatgccagggaaggcatcacctccaactgagccgagaaaatgccaaataatcctatgatcctgaaccttttcttcttcaatccccagggtgactaccgcttttcctggcgtcacccgcaggcgccggagaaggaaattttcagcctcaagtactatgccgatctggcccgtaaagcggaggccgcgacgctcgacgccatttttatcgccgatcatatcgctatctgggacacggtgcccagcggcttaacccactacgctaacgcccggctggagcccatcactctcctctcggcgctggcggcggtgacggaacatatcggcctgatgggcacggcgtccacctcttataacgagccctataatctcgcccgctattttgcctccctcgattttctcagcaacgggcgggccagctggaatatcgtcacctcatggctggaggaggaggcggccaacttcggccttgaccacctgccgcagcacggcagccgctaccagcgcgccggtgagtttattgatgtggtcactcagctgtgggactcgtgggaagacggcgcggtgcgctatgacaaagccagcgggctgtttgccgattccagcaaggtgcatcatcttgatttcgcgggcgagttcttccgcgtgcgcgggccgctgaacgtccctcgcccgccgcaggggcatccggtcctggtacaggccggctcgtcggaggcgggtaaaaacctcgccgccgcctggtcagatatgcattttgtgtttatcaaatctatcgctgaggggttggcctaccgcgaagagatgaaccagcgtttgcgcagccacggccgggatccggcgcatttcaaaatcatcgccggcgttttaccggtggtggtgaattcaaacgcggaaaaggaagagcgccagcggcttaacgagcagctaatgagcgaccagatggccatcgacctgctctcttcctatctgcgcatggatttatccgcttatcccgtcgaccaaccgctgccgccgctgccggaggaagagacctttgatgggatccgcaccgccctcaggctgattcgtgattacgatccgcagttgtcgatcctggcgttgggcaagctgctgttgcaaagctccgatagctggctgctcatcggcagcgccgaggagatcgccagcgcactgacggaaacctggcgcgccggtgccgccgatggttttaacctgatgttcccgctgctgccgggggacttcgaccgcttcgttgagcaggtggtgccgattctgcagcgcagcggcgcgatgcgggatcgctatccgaccggcacgctgcgcgagaagctgggtctgccggtcgtcgaaaaccgcttcgcccgccgggatggcaaaccgctggcttcatagcgcggctgttccccggtggcgctgcgctgaccgggctacgggttcaccgccgtctgcgatccggtagcccggacaggcgcaatgcgccgcctccggggaaggtgctgtgtctgaaacctcggtgcggtttcttcccggcttgcgctgcgcttagccgggctacgggttcacaaccgtctgcggatcggttgcccggacaggcgcaacgcgccgcctccggggaaggtgcgctgccggatgctttgctgcggttttcttcccggcttgcgctgcgcttagccgggctacgggttcaccgccgcccgcggatcggtagcccggacaggcgcaacgcgccgcctccggggaaggggctgtgtctgaaacctcggtgcggtttctccccggcttgcgctgcgcttagccgggctacgcgttcacaaccgtctgcgatcgggtagcccgggcaaggcgcttgcgccgcggcccggggaaattggcgcctacagccgcacgacgcccctggccgccgcctcatcacgccacgccagcagcggctgatagtccgcgcgccgcatatcgctgtagccgcagataaacagcgcttcgcaaagcggccggtagcgttcatcgctcaccagctgctgcaatgcctctctgagcagccccagcgtcgctgcggacgtcgtcgccgacgtaatcagcggcagacccggggcgagcgggctgcgcgcaatcaccgccagccccgccagcgcctccggctgatgacgctgcagcagcgcccaggtcacgcaatcaatggcggcaatatccgccgtcccctgctgaagttcacgcagcgactggcgatggctgccgctaaacgcgaccgccgagaagaaatgcccatcgcgcgacagcggcgcgaccatgtttaacagcacgttatagccggactgggaatccggcgaattgcacacgaccaggcgcccgcgaaaatccgccagcgtctgatcaccgtccgcctcacgtaccgccagcaggctgcggtagttccgcccttcgcatccgggcgccgaatagtgaaaacagccgaccgtttgcactgccggcagccgcgtcatcagcggataaccgcaggtctggctcaacagcagcgccggatggcgccagtgcgtcagcagatcctcaggtacctgatacgacagcgtatcctcctccaccacgccgcgggccgccagcagctgccgcaccgcccgccagagcgcctgagtatcctcgtcattcaccgcgtacatcggaaacgccagcctttcactcatgctcttcatccgccttaccctgctggttgaagccgggatgggcattcaccgccaccggtctggcaaaaaaatgccgcagccattcaccgtagccgcgcaccacaaacccggcgttgcgccgctgatactccgcctgattatgcagatagatttttcgcagcccgtaccacggtacccccggcaaatcgtgatgcactgaatggtagttgagattgaggaacagcactcgccagaccagccccgcctcgttaatcaccgaacgggccagcggatcgtccgcggcgcggtgttcaaggaaagagcgcactttggtcaacgccagcgccgggtagctgatagccagcacaaagtaaagcggcgaaaagccgagatgattcatccacgcgaacagcgccgccagcagcaggccgtgaaccagccacatcgctatcgtgttcacccgccggtgtcgaaatgccgccagcgcgctgccgagcgtctgggcaatatccagcagcggcgccaccagcagcctgccgataaacgtattgcgcagatgaataaggctgcgctgccagggggcaaaacgctgccagctctgcggcgtaaaatagtaggattccggatcgtcaaccggctgcgtcagcaaatgatgatgatggtgcgccaggtgcgagtcgcggtacagcccgtagggataccagaccgccagcggcagggtccccagcagctggttaaaccatggtcgcgacgtggggtgaccgtgaataagctcatgctgcaatgacatataccaggcggtgaaccagatgagcagcagcgtggcggggaaaatgcccagctcgcgccaccaggccagcgaggcaaaccagccgccgtagacggcaacgatcagtagccaggtgggtagctcgctgcgccacagccagctacgggaaaactgatgaatccgctcgcgctgctgcggatgcagatagaccgacctgctttttgccattcctgccactgccttttcgcgttatcgtttgatcctccgaagatgtgagataacgcgttaaataacaaagaatttaaatcgcttagctttgccagaaaatcaccttagccctcgttgagcacgatgatatatcgccacccggcgagcatgctcacgcccgcgcacgccagcagcgacgcccccagcgattgcccccacccggccgccagcagaccggcgccaatcaggacataataaaacaggccgaaaaaggcgccggcggtgccccgacagtcgccgtaggcgctcagcgccgaccccagcaccagcgggatcgccatggcccaggcaagggtgaccagcgcaaccggcgccacaaaccagattgattcccgcagcacgtacaccgcgacgccgccggctaagtgcagaatgcaggcgatggcgagtatccgccccagcgagacattccgacgcagcagccggtggttaagcagcgcgccgagcagcgaacccgcggcaagcgccatgccgctgtagccaaacgtcagggcatcaagatcgaatcgggcgaacagaaacggggccaggctgtagtagctgaacaggctgacgttaaatgccgccaccaggattgccgccagggcaacgcgcgtatcgcccaccatccgccgcagcacgtgaagaaacggccctctcctgaggttttgcggacgcgtttccggcatcaacgccaggcagcccagcagaagcgcggcggccaaaagcgccagcgcgctgaatacgccgcgcatcccccagagggcggtcaacccgccgccgatatagaccccgacggccgggctcaccgccagcgccaggccgataaacgaaaaaattcccgccagctgccgcccgcgatagcagtcccgcaggaccgtctgcgtcaccactgaaccggttgccgcgccagcggccgtgacgatccgcgccgccagcagcagcgaaaaatccgtcgcccacagcgccatcaggcatcccaatgcgtaaacccctaaccccgccagcagggccggacgccggccgtagcgatcgctgaatccgccccacagcaaaacgccgacggcaaaaccgataaagtacacggaaagggttagcgccgcctgcggcgcgctcacggaaaaacgggcgctgatatcggtcagcgccgggctataaatcgtttccgctatttgcggaaacatcagtagcgcggtcaccagcaccagcgcggcacgtcccaacatatccacctcctgattaacaagaggcgctattgtagggaagccgtttatcgaacattataaacataatgactttaaacatcggaaatcagacattatggcctggcttgacgctgacgcggcattcgatccggatgcgttgaaaagtagcctgattggcgtgcagtcggcgctcggtaaccacgactccggcagccaccggcataagatggcacagatcctgtttacccgtcagggatgcgtgcgtttaacgctcaacgatagcgtcctgctgtgcctgctgccaccggggcgcgcggcgtggatccccgctgaagtcagccatcgcgcggagatgaaaaacattgtcgactatcgttccgtctggtttcagccgcagcgttaccctcagttgccaacgcagtcggcgatactcaacgtggtgccgctgctgcgcgagctattagagcgcatcagcgccagcccctgggataccgactgggaggccgagccagcgcggcatctcgccgccctgtgccaggcggaaattcgcgccgccgcgcgggagccgatgatgctcgcgctgccgcaggataaacggctggcgatggtttgcggcgacgcgccgccgccgccgcttgggacgctcgctgcccgctgcggcgccagcgaaaaaaccatcagccgactgtttcgccgcgataccgggatgtcctaccagcagtggcgtcaacagtggcgattaatgaaagcggtcgagatgctggcaaccggggagcggattaccgatacggcgatggcgctcgacttcgccagcgacagcgcctttatctacttcttccgcaccatgaccggcatgacgccggggcgttatttttccgcctgattgtggccgcccggcgtgaacggcggcagcttcagaaaggtgttctgcagcccttcggaccacgctttgcgaatggtattgaaatagggatcgttttcggtgatccgatgctgttcggcgctgctaaggctaccgctgcggtacagcagggtgtccagcggcagccccaccgaaagattgctgcgcagggtggagtcgatcgaaatcagcgcgcagcacatcgcctgctccaggggagtatcgatggtcagaacccggtcgataatcggcttgccgtatttgctctcgccaatctggaaatagggcgtgtcgcgcgtggcttcaataaagttgccttccggatagatatgaaacagccggtgcgtttcgccggcgatctgcccgccgagcagcaggttgcagttgaagttggtattgccgcagttctgctgattgctgctgtcgcgctgaatcacctcctgtaaggttttgccgatcagcatcgccgcgtcgtatagcgaggtcacctgcatcaggttaggctcctgctgggtgcgaatgcgggcgctgagcaggctaatcacgctctgagtggtggccaggttgcccgccgactgcaggaccatgacccgttcgccatcctgatggaaaacgtgcagttttttaaacgttgcaatatggtccactcccgcgttggtgcgggagtctgaggcaaataccagtccatctgacaaacacatggccacacagtaggtcatcgttttttgttcctgccgttattgctgctgcgcctgctgcgaatgctcgcgcacttcagcgttagttaacatgatttcccccccgccgccgaggcgggtgccgcgtaccgggcacgcatcaagatagtccagcccggtcgccagccgcaaatgttgattcaggctgcgcgtgttattggtgatatcaaacgactgccagcgctcgttgagccacacttcggcccaggcgtgcatggcgacgtgctcggcgttatcgctgtaaacgtagccgctgacgtagcgcgccgggatctccagcgcccggcagcaggcgagaaacacgtgggtgtgatcctggcaaacccctttcgcgcgcgcaaaagcatcggcggcggagtcctgcacctgggtggcgcccggcgaatagggcattctcagcagcagctcggccattaaccggttcaggctctcctcctgcgcctccggctgataccagcgctgagcgaattcgcggatcgggccgtcggcgcgggtgagcggcgtacagcgcaagaaaaccagcggcgacagcagctcctgcggctccgcgccgatgtcgtccccctcttcggcgatatcgacgatcccgctggcgcggatggtaatctctttatgcggattatccagcgtcagcacgtgcagcacgttgccccaggcgtcggtggtggcgacggcggaaccgtccggcagggttaatgtccaggcggtgatcttctgccgaccgctgctgcgcggcgtcaggcgcagatactgggtcgaaaacttcacttcttcatcgtagccgtagcgggtcaggtgatcgataaccagtttcataacgcctccagataggtttgtctgatgctgtcggaaagcgcgttaatccgcgccagcagtgcattaagggtgacctgtaaatcggcctgcgccagatcgtcgcgggtgctgaaacgcaggtcgacgttgagctggtgcgccagccgcagcggcaagtgcgagcggtcgttggcaatctgttccagctgcccgacgaggtctgaaatactcgctctcagcgatctcggcacatcgttgcgcaggatcagcagctccatcaccgtttcgcggctgaccggctggcggtaaatgctgttgtaggcctcgcgggcgctgaccgcattaagtagcgtatccagccggtagtattcgcgtaccggatcgggatcgctgttcagctgctgatccttaatcaacagcagctgcgcggtggcggatgcccgctcgatcagcgtcccgatcccgataaagctcagggcgtcgttacgcagcagcgtgccgaggatcgccccgcgaaacagatgtacccgctcttttacccactcaaagaaagcgtcgttgcccagctcgccgatcccctgctggcgcagctttcgcagctcaatgcgcgtggcgttgatgctttcccacacctccgccgacaagctgccgcgcaccgcatgggcgttgttccacgccatctcgacgcaactgaaaatgctgtacgggttgttgccgtcgagcgcgaaaaaattaagcaggttgctcatagtgaaacgcgcgtgccgcgcctgaaacagctcatgggtcagcgacagattcagcggcaaggctaaatcccgcgactgctggctgtggcgggggatcatcgacagcttccaggtcacgtccagcacccgggcatagctttccgcgcgctcaaggtagcgcgccatccagaagagttcactcgctgtgcggcttaacatgattcatcatcctccatcacccaggtatccttggtgccgccgccctgcgacgagttcaccaccagcgagccttcggttagcgccacccgcgtcagcccgccgggaaccaggcggatctcctggccggaaaggacgaagggacgtaaatcgatatggcgcggcgccagcccctcgtcgacaaaggttgggcaggtcgacagcgccagggtgtcctgagcgatatagttggccggattcgccagcaggcgctggcgaaacgcatcgcgctcctctttggtcgagcgcgggccaaccagcatgccgtagccgcccgcgccgtgaacctctttcacgaccatcagttcaagattgctcagcacgtagctgagatcttccgccttacggcactgccaggtgggaatattgctcaggatcggctgctcgcccagatagaagcggatcatctccggtacgaaggggtagatcgatttatcgtcggcgacgccggtaccgatagcgttggccagcaccacgcccccggcgcgatacaccgacagcagccccggtacgcctaacatggagtcggcgcggaaggccagcgggtcaaggtatgcgtcgtcgatacgccggtaaatgacgtccacgcgccgcggtccttcggtggtgcgcatatacaccgccccggttttaataaacagatccgcgctttccaccagctcaacgcccatctgctgggccaaaaagctgtgttcaaaataggcgctgttaaaccgtcccggggtcatcaccaccacgcacggatcgtccaccggcgagctttcgcgcagcgtttgcagcagatagctggggtagcgttctaccggcgcaatatggtgctgttcgaacatttcgggatacagccgcatcatcattttgcggttttccagcatataggagacgccggagggggtgcgcagattatcctccagcacgtaatactggccgtcgctgttgcgcaccatatcgactccggtgatatgggcgtaggtgttattgggtaaatttatcccctgcatacagggttgatactgttcgttcgccagcacctgttcggccgggatcagccccgcgcgaaggatattttgatcatggtagatatcgtaaagaaaagcgttgagcgctttcacccgctggcggatgccgcggtcaatccgctgccactcgccggcgggaataatacgcggcacgctgtcgaaagggatcagtcgttcggtgccctcatcctcgccgtagacgttaaaggtgatgccgatgcggtgaaagagcagctccgcctgctctttcttctgccggatagagaattgatcggtactgcgaaaccattgccaccaggcgttatagtgctgacgctgctctccctgtgcggtaagcatctcatcataataatgcccgtcaggaagcgttatttttatcatggtcgtctcctccggttgtactcactttgaggtaatcccggtaagagataagcattaattatgccaggtaacgcagcgcggcggcgcggcgttacgctgttatgccatgacgctgaattgaataaaaaacaatcagacgctttgcttatttatggcctgtttttcgcgtaaagcgcaccaatttggggcaagtcgattcacgcgatactaacgcgccgccagccacgctgcgtagcgctcgggccactcgacgctgggcgtaccggcccggcccagcgcaaaaccgtgaccaccgctggcgtaacgatacagggtgaccgggacctgatgctgacggcaggcggcggccattatcaacgtattgtgcggatcggagacattatcgtcctccgcctgaaccagaaaacagggcggtgtccgcccgctgacccaggtttgtaccgaccaggcgcgatcgacctcctccgcggcgtgaggcccggcgaggagccgatgggtggcggtatgggtgtacggaggttcgagggaaatcaccggataaatcagcgcggcgccgtcggcccggggcggggtgtcgtccacgccgtcgatcggcgggtaagaggcaaaatcagcgcgacaggcagccattcccgacaaatgtccgccggcggaaaaccccagaaggctgactttggcttcccgcagacgaatcaggcgcagcgcccgctgagcgtcctgcagcggagcaaggccgcccgcttgccacccctccccgggaagacgataggtcagcacgtacgcggtatagccgcgcatcgttagccagcgcgcggcgggccaggcctccttcgccatttcaatgcgtcgatagccgccgccggcagcaattaatacgccgtggccgcgtggcgctgcgggacgccataccgtcagttcaggctgggcgatatggcttagcgcgccgcgtgccgataagcggacggggccgtccggtccgccgccgccgggaggcacgccaggccacaggcggatcgtttgctggctttcagcggcgcgaagacgaccgcccgccagcagcgcggcggcgcttaaaaacaaaaaatggcgtcggttcatcggcggctcctgagacggaaattagtcattaacgagcttgagttccagccagtccaccaccagacccggcttgataaaatcaaagcctacacgatatttccccgactgtagctcaatccgacacagcttctgcacaatctcacgaccgagcgtaccgttggtctggatcgtcgccacaaattgttcattaagcagcaggttgcaggcggtttgtgcgagcggcgcaccgttagcgtgaacgctcaccagcacatcatataccgctgttcgctcaacgctcagcaccagctcctcgtcgtagcgcagccgcgactgctcggcgattttaattgcgccaggacaggccccatcgcacgcaggatccgccgccaggtgaataatccccgcccgcggcatctccccgcgcttaaagacctgcgtctgcatcataaagtcgaggatgtttatcgcgcagcgctgaagctcaccgagcgttagctcgcctgtcgccagcgccgccagggtattatctccccccgcattaacttccgcgccgttattattgaccaccatataaaggtcgttctgcgcgcggatcatcgccgcggtgttgtgggtgctcgccgcgccgccatcgacgggatcgttcatcgttgcccaccagtcggtcatcacgatcccgcgaaagccccactcctcgcgcaggacggtggtggtgagatcgtagttggatgcggcatggtggccgttgaccgggttataagcggtcattaccgcatttgcgccgccggatttcaccgcatactcaaaacctttgagatagatttcacgcagcgcgcgctctgacaccaccgaatccgctttggctctggcgaactcctgattgttgcaggcaaagtgcttgagggtggcaatcccgccgccgctgcgaatgccgcgaaccaccgccgccgccatcatcccggtgagcagcggatcttcggaaaagtactcaaaattacgcccgttcagcggatggcgctggatgttcatccccggccctaacagcaggtcgataccgttgcgcagcagctctttgccttccatcacgtataagcgttccacgaggatcgggtcccagctggaggccaataatgttccgctgggaagcaaagtggcctttgcgccgttatccatgcgaatcccggatgggccgtcggcggtcgatgccagaggaatacctttttccagcaggctgtcggccacgccgccaaaagccgacgcgacgccgggcgtcactttgtggctacacatgccttctccgcgcaccaggcaggccagctcctcaacagacagctgagcaacaaaggcattcatcgtggtacgcccttcagccacgtcgttgagggtcagtccctggttaccggtaagggtgatagcctctggcaaacgctcctcaatgcgcgcgcgcagattaatctcccgccgcggcacgtcctcccactcgatctgatagcgcccatcatcgccgtccgcgaccggttttatacgtacgaaaggcaccgtcggcgccagcacctgctgatggcaggagaggatccgcagcgttttctgcgcgtaccccgcctcgccgtcaaccgccagcggctgtacatcgcgcacgctgttaccaagcagcaaacgataaagccctggctccatcacgtaacagtgtggatgcccggtcgctccgctatcgtccagagaagcaaagcgctccagcggaattgataacgttaaggtttcgctttccccaggtcgcagcaggcgagttttggcaaaagccaccagcgctttggccggtttgccgagcgcgccctgcggcgcctggaggtagatttgcaccacttctttgcccgcgaagcgctccccgcgattggtcacggtgacggtcgccttgatcaggtcgccaaaagtctccgcccgcgccgattgcagggtgaaagaggtgtatgagagaccaaagccaaaggggaactgcagacgctgcggacaaaaggtttcgaagtagcgatagccgacgtaaatatcctcctgatagaggctttgcgcttccgccccccagcagggcgatgccggatggtcgtcgagagagatcgcgatgctgcctaccagcttgccggatggcgtcacctcaccatagagcagcgaagtggccgcctgagcgccgtcggcgccgccgtgccagacgtagagcagcgcgcgaatgcgttgacgcagccgcggatcgtcagcccatgagagatcgataagcccggcggtattcagcaccaccgccacgtcatcaaattcgccgcagacctgatacagcaggttcatttcgtcggcggtgagccgatagccaccttccacgtcggcgttgtcccgatcctctcccgcggtacgcccaaaaacaatcactgcctggctggagaaagcgcgcgcctgacgaatctgctcatcgctcagcggcatctcctgctggcaccagggttccgctgcccagccccctccgccgttgtcgaaggggtgttgttcaacccagcgttcgtagagtccggccagctgcgtattcagcctcatcccgtttcgcgcacgcatcgcctgcagcaaggttgtgctgctcaccacgttaaccgccccaccggaaccggtaccgctgcgatagtagtcaatctgcgttcggccaaataacgatagcggccgttcgggagcgagcggcaacatttggccatcgtttctcaacagcaccgcgccttcggcagcggcggcggcggcaaattcggcaaacccttccagcggcgtccccgcttgactgtcatacatggtgttgtcctgttaactcatgccccgacaggaggcttaatagcataatgaacagagcccgcgaaatgcgggctccgctgtgctcagaagaaatacttgaagcgcagccggccgccgtagcgggagtcttcctggccgtcgccgttgttcgggtgggattcaatccaggatgcgtaggcgcccagatagatgttgaagttcttcatattcatcacgttcggaaacagatacgacgcatgaatggtgtggatatcatattttcccggatcggcgatccagcagttatcgtcgcagttagcgataaagttagcggtattaaagctttcaatcttgttatgcgcgtaaatgtagcccagctcaacaccgtgccacagggagttcaccccggcggtaaagtcggtttcatcttcggcatccatataagcgacgttaaggttggtcaccacgccatccagcggatcggttttttgcccgttccacgtcatcgtatagccatagccggtgcggctggactggtcgacccagcgccctttcgcatcgtgatagccataggcgttattcaccacgttgctctccatggcgatggcggtggagaagcgtccgctgttccacgcaataaccgggcgtaaataggcgacatttttctcattttccagttcagtaccgtgatactgctggtcctggaacagcgtgctgccgttttccagcagggtattgagttcaaaataccagttatcaagggttttgctcatcaggaagttgccgccgctgctgctgcggccgcgcccttccttcatcatgtagatatagccgtagccgtcgctgtagagatcgttggcggtgttcccggagtattccacgaacgtatcctgattcagcgggaacatatcgtaggcttcgaaacggccgaccttcaccttccagtcgttctcctggccaaaaaagaataccgcatcatcaagattcattttgccgttcaggtcagccagcggctggacggaaaaaccggcaaagctgcggttatccattttgcgcataccgtcaaaacctagcagcaggcggccattaatatcccagcgttcgttattgcccggcgcccaatctttattcgccgtggtttttaccgaagtcaggctaccgctgctgctggcgccatccatattgaattccacatcgccataaaatttgatatccccgtagccggacagcgtcagtttcgtcggctccgcgcccggtgcgacgggctcggcggattccacttttacggttggcgtacttttcgccacagcggcctgctgccgggttaaggtctgaattttcgcttccgcatcggccgcccgttgctcagcatttattaagcgctgttccagctgcgctaaacgcttttcaatatccgcaggagcattatttgtcgctgcccaaaggccagaggagaacaggccactaataaccagagctatatactttactttcattattaacatccctaattacattattatttgtttcatccagggtaaaaccagggctatccagagaaatagtctgtacagccctttaaatacggtgttgaataatcaggattcagcgaaggttccgtggtttaaatcatcgacgatgccgttcattctcttttccgttaagccgtagaatttaatagagacggcggtaataacataaaaaacagaaggaaccagggtgaacaacagcaccacgccctgcaccgctgaagctggctgcaccgcggtgttagcggcgtaatggtaataggccaatatccagccgaggatcgccccgccaacggcgacgcccagcttgataacaaagatatttgccgcaacgttcataccggtaatacgccgctgggttttccattcgccatagttattcacgtcggtaatcatcgaccactgcagcgcgccgttgccgccctgaataatagaaatcagaatatgcacgccgagcaccgcaatccagaattgcaccggaacgataaagcagaccacgcccagcgcggcggtgagcaggttaatccagaaagagagtcggaccttacaaaaacgcgtcccgaagggcttggccagcaccgaacccagcatggaggcaaacatcccgccgagcatgaatatcgttatcacgtcggcgcctttatgcagcacgctattcacatagtagacgacggcgccaccgcgaatcactacggcgaccagcatcataaaattgtaaacggaaagaatacgccactgatcgttacgaaacagtattttcacgtcccgcgctacgttcaggttctcttctttaatcggctgcacgcgctctttggtggtggcgaagcaggtgataaacatcaggcagccgataacgccaaacagggccatcgagacctgaatgccggtcgcgcggtcgccgggatagagaaagtcagccagcggtaaaataaacgcggtaccgagcgcgccgccgattggggtgatagcgaaacgccaggactgcagcgagaggctttcgcgcggatcggaggtcagcgccgcgcccagcgagcagtaaggaatattaatcgccgtatacatcagggtcataaatatataagccgccacggcgtaggcaatttttccggagtcggagaaagagggaatggaatacaccagcacgcagctcaccgcaaaggggacgcagatcgccagcagccaggggcggaaacggccccagcgggttgaggtggcgtcagcaatcgcgcccataatcggatcggtaatcgcatccagcagacgaaccagcaaaaacatcgtccccatcacggcgggcggcaggccataaatatcggtataaaaataagccagaatagccacggacgagtcaaatacaatgtgactggccgcgtcccccaggctatagcctattttctctctgacagaaattttgtcgccagcagacatacaccactcctttatgcaaaatgaaaccggtttctgtaatgtctgcattttttacttatccgctatgcgggcgccattatgttttttaattaattatttatgttttttaatttatgtgatcctgtcagccttcagtcatattaatcccgggaattctgtctgacagatcacaggttttcatcctttgcgcaatttttaaaaggcgataaatatgaccattattgtcacagataaacatcagttccgttttctatttactggcattactattgaacggtgttttttatttgcgcaaaaacattcataacacaaataacatcatgccagtttcatatgattaagattataatattgtgcttagcacaatagtgccggttggctgccggccagtgggcggtaaatactctgttttcacgtaaaatgttacctcggacacgcgcagcggcggatattcgtctaaggttttctgatggccgaatgcagtggcacatagtctgcaatgataaggagaacaatctatgacgagtcccgtttcccgtcgccccgctaccctgccttttgctcttcgtctggcgctagggggcgcgtttgtcgccctggcgacgttgacggctcaggctgaagaaacccgtcccaccccgcaatcacccgatatcctgctcggtccgctatttaacgatgtgcaaagcgcgaaacttttttctgaccagaaaacgtttgctgacgccattccgaacggcgacccgctgatgatccttgccgattatcgtatgcagaaaagccagaccagctttgatttgcggcacttcgtcgaactcaactttaccctgcctcgcgaaaacgaccagtacgttccgccaaaaggacaaacgctgcgccagcatatcaacggattatggcccgtactgacccgcagtaccgtcgacgtcgaaaaatgggattcgctgctgccgctgccaaagccctacgtggtgcccggcggacgctttcgcgaagtctattactgggacagctacttcaccatgctcggcctggctgagagcggccactgggataaaattgaagatatggtgaccaacttcgccgcggagatcgacgcctggggccatatacccaacggcaaccgcacctactatctgagccgctcgcagccgccgttcttcccgtttatggttgaactgctggccacgcacgagggcgatgaagcgctcaaaaaatggctgccgcaaatggagaaagagtaccagtactggatggatggcgctgaggcgcttgagcccggcagcgccagtaagcgcgtggtgcggatggccgacggcgccctgctcaaccgctactgggacgataacgacacgccgcgtccggaatcctggctggacgacgtcacgaccgccaaaaacaatcccaaccgaccggccacggaaatctaccgcgatctgcgctccgccgcggcatccggctgggacttcagctcccgctggatggataacccgcagcagctcggcaccatccgcaccacctcgattgttccggtcgatctgaactcgctgatgttccacatggaaaaagccatcgcccgcgccagtaaagcggcaggggatagcgctaaatccgcgcagtatgacgccttagccaacgcccgtcagaaagcgctggagaaatatctgtggaacgataaagagggctggtacgccgattacgatctgaaaagtcataaggtgcgcaatcagctgaccgccgcggcgctgttcccgctgtacgttaacgccgcgtccagcgaacgcgccgcgaaggtcgccgccgccaccgaagcgcgactgctcaagcccggcggcctgaccaccacgaccgtcaatagcggccagcagtgggatgcgccgaacggctgggcgccgctgcagtgggtcgccgctgaaggcctgcaaaagtatggccagcagaaaatcgcaatggaggtgagctggcggttcctcagcaacgttcagcacacctacaacagcgaacagaagctggtggaaaaatatgatgtcagctcgaccggaacaggcggcggtggcggagagtatccgctacaggacggctttggctggaccaacggcgtcaccctgaagatgctggacctggtgtgtccgaaagagaagccgtgtgactccgtccccaccgcgcgaccggcggcaaatgacgacaacggcaaagcggcggacgtctcggcgcagcctgccgctcagcagccggctgcggtagaggagaaaaaagtcgcgccgtaaacctccgcgcggcgggggcccgccgcgcgtctttatcaatttgcagttccagaatcggccgggccgacggctccccggcaagttgaacctgcggggagcgccctttacatggcgtccagcgccttctgcagcttccagatatagcgcggcgcctgcggtgccggatgctttttcaccacgtgctcaaagaaatcatcggcgtccatatcgttaatctcttcaatcgcatcctggcgattggacgagaatgtccgcagcagcgcgcccgcgccgttggcataggagaccaccaccgcatagcgcatcacctgcgggtctttaatccccgccagcggaccgttttcgaggatgctgaggtaggccgcccccatcgaaatattgcgctcgggattcttcagctcgctcaccgaaggatccccgctccagcccatccgccggtaaacatcgcgaccggaggtcgagggcttcagctgcatcaggccaaccgcgccggatttgctgaccaccgtcgggttaccgccggactcaatggcgatgatggcggtaatcagctggggatcgacgccccacgccgcaccggctttttcgctgattggcatccactgcatcgcccgcttaaccgggacttccgggttccacggcgggttacgataatcgtgttttgaactacaaccggccaacaatacacataaaaaaacacaccatctcaatttcacacatctatccttattggctgaagtttgccgcacggagatgacaataaacgctccaggcggcatgataaccctttcattcttagcaaggaattgtcatgtctcagttttatctcgtcgccccttccggttactgcatcaaccaggaagcggcgtatcgcggcgtgcagcgtctgcaggaggccgggcaccaggtcgcacaccaggaagtcattccccgccgggcgctgcgctttgccggaactgagaatgaacgccttgccgatatcaaccagctcgccgccctcgccggtaaaaaccgcatcgtgctggcggtacgcggcggctacggcgcgactcgcctgctgccgcagattgactggcaggcgctgatcgcgcgccagcagcaggatccgctgcttatttgcggccacagcgatttcaccgccatccagctggggctgctggcaaagggtagcataatcacttttagcgggccgatgctggcgggaaacttcggcgctgaaacgctgaacgaatttaccgagcaccatttctggcaggcgctgcgcaacccggcgtttacgctcgaatggcacggtgaaggcccggactgtcgcgccgacggcacgctgtggggcggcaacctggcgatgctgacctcgcttatcggcaccccgtggatgccgcagattagcgacggaattctggtggtggaagatattaacgaacacccgttccgcgtcgaacgcatgctattacagctgctcaacagcggtattctcgcgcgccagcgggcgattatcctcggcagttttaccggcgcaaacgccaacgactacgatgccggatacgatctgcctatggtatacgactaccttcgccagcagcttaacattccggtcatcagcggcctggatttcggtcacgagcagcgtacggtcaccctgccgcttggcgccagagcattgctggtaaacaacgcatccatcaccacgttaagcatcagcggccacccggttctggcggaataaaaattcctctaacgcatatcccgatcggcgtcagattgttaaaatggtgtagtttttaatttatcttcacgccggtaaggagtacgtcaacattggacgccgctgcggtcattagtctgtttatcctgggttctgttttagtaacctgtagtattttattaagttccttttcctcacgcctcggcatcccgattctggttatcttcctggcgattgggatgctggcgggcattgacggtatcggcggcattccgtttgacaactaccctttcgcctacatggtgagcaacctggcgctggcggttatcctgcttgacggcgggatgcgcactcaggccagctcttttcgcgtggcgctgtggcccgccctctcgctcgccacggtcggggtgctaatcacctcggccctgaccggactgatggcggcctggctgtttcatctcaacctgattgaagggctgctgatcggcgctatcgtcggctcaaccgatgccgcggcggtgttctcactcctcggcggtaaagggctgaacgaacgcgtcggctcgacgctggaaattgaatccggcagcaacgatccgatggcggtgttcctgaccattacccttatcgagatgattcagcagcacgagaccggcctgagctggatgttcgcggtgcatatcgtgcagcagttcgggttgggtatcgctatcggcctcggcggcggctatctgctgctgcagatgattaatcgcattgtgctgccggccgggctttatcctctgctggcgctgagcggcgggatcatgattttcgccgccaccacctcgctggacggcagcggcatcctcgcggtctacctgtgcggattcctgctcggcaaccggccgattcgcaaccgccacggtatcctgcaaaacttcgacggcctggcgtggctggcgcagatcgccatgttcctggtgctcggcctgctggtcaccccgtccgacctgtggcctatcgccatcccggcgctcattctgtcgatgtggatgatctttatcgcccgtccgctgtcggtgtttgccggtctgctgccgtttcgcggcttcaacctgcgcgagcggatatttatcagctgggtgggcctgcgcggcgcggtgccgattattctcgccgtcttcccgatgatggcgggcctggagaatgcgcggttgttctttaacgtggccttcttcgtggtgctggtctcgctgctgttacaggggacctcgctctcctgggcggcgaagaaagccaaagtggtggtgccgccggtcggctcgcccatctcccgcgtcgggctggatatccatccggaaaacccgtgggagcagttcgtgtaccagcttagcgccgaaaaatggtgcgtcggcgcggcgctgcgcgacctgcatatgccgccggagacgcggattgccgcgctgtttcgcgacaacgtactcctgcaccctaccggcagtacccggctgctggaaggcgatattctctgcgtgattggccgcgaacgtgacctgcccgcgctgggtaaactgttcagccagtcgccgccggtggcgctggatcagcgcttcttcggtgattttatcctcgatgccagcgccagatttgccgacgtcgcgcagatttacggcattgacgggggagaagagtttcgcgatcgccagcagtcgctgggtgacgtcatacagcacctgttaggcgccgccccggtggtcggcgaccaggtggaatttgccgggatggtgtggacggtggcggaaaaagaagaggatcacgtactgcgggtcggcgtacggatggcggaagatgaggcggagtgatccgcctcaggctaagttacaccgtcacaaccggtacgcgcggcgcgagcgcgcacattaattcatatccgacggtgccgcaggcggccgcgacatcgtcaattttgatctctttgccccacagctcaaccggcgcgccgatccctgcctgcgggcatggggttaaatccacggccagcatatccattgagatgcgcccgaccgtcacggtgcgtacgccgtcaaccagcaccggcgtaccgctcggcgccagccgcggatagccatcggcatagccgcaggcaacgatgccgatacgccgctcctccgccgtgcgccaggttgcgccgtagccgaccgcttcaccggctttcaggttctgtacggcaataatttcgctgcttagcgtcatcaccggtttcagcccggtgttggccacgtcctgccacaggccggaaggcgaggcgccgtacagcacgatccccggcctcacccagttaaaatgcgactccggatgccacaaggttgccgccgagttcgccagcgagcgcgggcaatccagcccttccgccgcctgctcaatgcgccgcatcggctcgacaatgccgtccgggttttccgcttcggcgaaatgcgacattaacgtcatttcgctgacgttaccgagcgctcgcagctgctgccagacgatgtgcaaacggtccggcataaaacccagccgattcatcccgctattcaccttgacgtaaatatcgaggggcgcgtgcagcttcgcctgctgcagcgccttgatttgccagttactgtgcacgctggtagtcaatcggtatttatcaaacagcgccagctcatcggcatggaagaaaccttccagcatcagtatcggccctttccagccgagctcgcgcagcaggatcgcctcttcaagattgagcatcgcgaaaccgtccgcggcgctcagcgcgttccagacccttgccaggccgtggccataagcattggctttgaccaccgcccacaggcgcgagccgggcgccgcgcggcgaacaatgtgttgattctggcgtaaggctgacatatcaatgctggcctttacaggacgagacatgaaagctccttgttaattgtgaacgccatgcagatgctgagcgcgggccggcgtaaagccgcggccgtagcgggcgacggcaagatcgtcatacgggatcgccggcgtacgcccggagatcagatcgctgatcagctggcctgaaccgcaggccatggtccatcccagcgtgccgtggccggtgttgagccacagatttttatacgccgtgcggcccaccaccggcgtaccgtccggggtcatcggacgcagtccggtccagaaggttgcctgttcaacgtggccgccgcgcgggaacagatcgcgcaccaccatctccagggtttcacgccgcggctgcagcagttctttattaaatccaacaatttccgccattccgccaacgcgaatacgcctgtcgaaacgggtgatggcgattttgtaggtttcatcaaggatagtcgaaaccggcgcgccgtcttcttgcgcgatcggaatcgtcagcgaatagcctttcagcgggtagaccggaatatccaccagccctttcagcatggccgtcgaatatgaaccgaatgccatcacgtaagcgtcggctttgatgatttcagcgccgcacttcacgccggagatgagatccccttcatagagcagttcatccaccggtgtattaaaacggaaagtcacgcccgcctgttccgccatcagggccagacgcgtggtgaaaagctggcagtcgccggtttcatcattgggtaaacgtaaaccgcccgtcagtttatggctcacttccgccagcgccggttcaacgtccagcaggcggtttgcctccagcagctggtaaggcacgcccgcctcctgcagtaccgcgatatcgcgggtcgcgttttcgaactgcttgtcggtgcggaaaagctgcagcgtgccgccctgccggccttcatactggataccggtgctctcgcgcagcgccttcaggcagtcgcggctgtactccgccaggcgcaccatacgtcctttgttttccatatagtggcgagtgtcgcagttgcgcagcatctgccacatccatttcagttggaacggcgtgccatccagcccgatagccagcggcgcgtggcgctggaacatccacttaatcgccttcaacggtacgcccggcgccgcccacggcgcagcgtagccgggagagatctgcccggcgttagcggcgctggtctcttcggccggccccggctgacgatcgataaccgtcacttcatgtcctgcctggcttaagtaccaggcgctagcgactccaactaccccacttcccagtatgacgacgcgcatagcggctccgtaatcgttaaagaacaatcatctgattacaaattgataactcagatgaaaatattattcaacatacgctttatttatggtgacttatctcacagggttctgcgccagctctgcccccgtcggtttaccatctcctgctgcgcctcatttttctacagaataaaatcctgtttaaaccgcaaaaaaacgcctataagattgtgaaatcgcgaagaaaagaaaatgtggatgcacgcagtttgcgacgccgtgttctatgcttgttaagaggttttccgtacagagagaaccatcaacaacgagggcgcgctaatggctacgattgattccatgaacaaggacacaacccgtttaagcgatggacccgactggacttttgagctgctggaaacctatctggcagaagtcgatcgggtggcgaagctgtatcgtcttgacacctatccgcaccaaatcgaagtcattacttccgaacagatgatggatgcctactccagcgtcgggatgccgattaactatccgcactggtcgtttggtaaaaaattcattgagaccgaacaggcctataagcacgggcaacaggggctggcctatgaaatcgtcattaactccaacccctgtatcgcctatttgatggaagagaacaccatcaccatgcaggcgctggtgatggcgcacgcctgctacgggcacaactcgtttttcaaaaataactacctctttcgcagctggaccgacgccagctccatcatcgactatctcatcttcgcgcgtaaatacatcaccgaatgtgaagagcgctacggcgttgatgaagtcgagaagctgctcgactcctgccacgccttgatgaactacggcgttgaccgctataaacgcccgcagaaaatctcgctgcaggaggaaaaggcgcggcaaaaaagccgggaagagtatctgcaaagccaggtgaatatgctgtggcgcaccctgccgaagcgcgaagaggaaaagaccattgaagcggcgcgccgctatccgtctgagccgcaggaaaacctgctctactttatggagaaaaacgcgcccctgctggagccatggcagcgtgagatcctgcgtatcgtgcgtaaggtcagccagtatttttatccacagaagcagactcaggtgatgaacgaaggctgggcgaccttctggcactacaccatcctgaatcatctttatgatgaaggaaaagtcaccgagcgctttatgctggagtttctgcacagccacaccaacgtggtgttccagccgccctataacagccagtggtacagcggcattaacccctatgcgctgggttttgccatgttccaggatatcaaacgtatttgtcagtcgccgacggaagaggacaggtactggttcccggatattgccggatccgactggctcgaaaccctgcacttcgccatgcgcgacttcaaggatgaaagctttatcagccagttcctgtcgccgaaaatcatgcgcgatttccgcttctttaccgtgctcgatgacgatcacaacaactatctggaaatatccgccattcataatgaagagggatatcgtgagattcgttcgaagctttcagcgcagtacaacctgagcaacctcgagccgaacattcaggtatggaatgtggatctgcgcggcgaccgttcgctcaccctgcgctacgtgccgcacaaccgcgtgccgctggataaaggccgccgcgaggtgctgaagcacgtccaccgcctgtggggatttgacgttcttctggagcagcaaaacgccgatggtagcgttgagctgctggaacgcacgccgccgcggcccaatccgctgtagcgcgtaaaaaagcaaaacgcccggtgacagaaccgggcgttgtttattcgtgggcggggtctagcgcatattaatcgccaggtcacccggcaaattcttctgcatacgatgccaaatctccccgctgtcatgcccgtagcggcgaacgatttcataaacctgttcatgaagcccttcttcacatactttcgccagctgatgatagaagccgagcgccaggctacgcgcttccgggttggcaaaatagtgacgacctatgcgggtgtacagacctttcatcccgttgaggatcaggccgtagatggggttacctgaagcaaaggccagaccgcggaagatattataatccagctcggcaaacgcatcggcgtggtcttcaatttcacgcgcgctcgccagaacctccagcgctttatccgggtgctgacggaaagcggtgcggataaaaatagtcgaaatattggtacgcacggacagcagattatcaatcagctgcggaacgctgtcgtgatcgagacgcgcgagggtttcgagaatattcagacctgacgtttcccagaagttgttcaccctggtaggcttaccgtgctgaatagttaaccagccatcgcgggccagacgctgcaacacttcacgtaaggttgtacgggtaacaccaatcagttcagaaagttcacgttcagcgggaagaattgaaccaggagggaagcggttattccagatactttcaatgatgtactcttcagcgaaacccgcagggctttgcgccttaatgaccataataagatttccattacacagcgttgctattcgactcatcataccagagcgaccataaggcagatagcgccagaaagtaattaaaaagggatcgccgtttcattttcaacttttcatttcacactttctgtggctaaagaacgtgatgcgaagaaagttgcgtctcgttttgcgcaactggtaatcttgcgtatagttacgcataaaatcatgtttcagaatttgacggagaaaggatgtctgtcgtggaaatgtcgtatggccgcgccctgtggcgcaactttcttggtcagtccccggactggtacaaactcactctcatcattttcttgatcgttaatccgctggtcttttatcttcatccgtttattgccggatggctgctggttatcgaatttatcttcaccctggcgatggcgcttaaatgttatccgctgctgccgggcggcctgctggctattgaagcggtatttatcggtatgaccacgcccgggcatattcgcgaagaagtggccagtaatcttgaagtcctgctgctgctgatgtttatggtggcgggtatctacttcatgaagcagctgctgctgttcatcttcacccgtttgctgctcggcattcgcagcaagatgctgctgtcgctggcgttttgcgtcgcgtccgctttcctctccgccttcctcgacgcgttgaccgttgtcgccgtcgtgatcagcgtagccgttggcttctacggtatttatcacaaagccgcttcggcgcggccggacgatgacaacatgctcgacgacagccatatcgagcagcactatcgcgatgttctggagcagtttcgcggcttcttgcgcagcctgatgatgcacgccggggtcggcaccgcgctcggcggcgtaatgacgatggtcggcgagccgcagaacctgattatcgccaaagccgcgggctggcacttcggtgaattcttcatgcgcatgctgccggtaagcttaccggtgctggtatgcggcctgctcacctgcctgctgctggagaaattccgcctgtttggctacggcgaaccgctgccgccaacggtgcgcaaagtgctgcaggagtttgacgatcgtagccgtcagagccgcagccgccaggatcgcctgcgccttatcgcccaggggattatcggcgtctggctgatcgtcgcgctggcgctgcatctggcggaagtcggcctgattggcctgtcggtcatcgttctggcaacgactttttccggcgtcaccgacgaacacgccatcggcaaagcgtttaccgaagcgctgccgtttaccgcgctgctgacggtcttttttgccgtcgtggcggtgatcatcgatcagcacctgtttgccccggtgatcgaatttgttctccaggcctcgccgcacgcccagctgtcgctgttctatctgtttaacggcctgctatcatcgatttcggataacgtcttcgtcggcaccgtgtacatcaacgaagtgaaagcggccctggagcatgggacgatcggcctgccgcagtttgagctgctggcggtggccattaataccggtactaacctgccatccgtcgccacgccgaacggtcaggccgcgtttctgttcctgctcacctccgcgctggccccgctgattcgcctctcctatggccgtatggtgtggatggcgctgccgtatactctcgtcctgaccctggtgggcctggcgtgcgtcgagtttaccttgatgccggcgacccagtggatgctggagcagggttggctggtgacgcctcagctgctgaaataaaaagcaatacccggatcaaaaatccgggtattccatattcgcttacgtaatattttcagactagctgctggcgtcgcatcggttttcgtttacactgccatgatttagcatgttccagggaaatgattatgttgcgatatttaaaccagtgctcaaggggacgcggtgcctggctcctgatggcgcttaccgcgtttgttcttgaattggttgctttgtggttccagcacgtcatgctgctgcaaccctgcgtactctgtatttacgaacgctgcgcgctttttggcattatgggtgccggtattgtcggcgccattgcgccaaaatcgcctctgcgctatgtggcgattattatctggctctacagcgccctgcgcggactgcagctggcatgggaacacaccatgattcagcttcacccatcccccttccagacctgcgatttcgccgctcgtttccccacgtggctgccgctggataaatggctgcctcaggtatttgtcgccaccggtgactgctccgtacgccagtgggaattcctgacgctggaaatgccgcagtggctggtcgggatcttcgccgcctatctggttgtcggcgcgctggtgcttatcgcacagccgtttaaacctaaaaagcgcgatctgtttggtcgctaagaacgattgctgataaagcgctcctccgggagcgttttttttgcctgcacgttgacgtcggtcacataaagttgcatattaaatgcaacttatcgatgttaactaaggagcacatgatgtctcatttgcgtattcccgctagctggaaggtaaaacgctccaccccattctttaccaaacagaacgtccctgccgctctgctgacgcaccacaacaccgctgcgggtgttttcggccagctttgcgtgatggaaggtacggtaacctattatggtttcgccgacgaacaggcgacagagcctgaagcaaaagtcgttatcaacgccggacagttcgcgaccagcccgccgcagtactggcaccgcattgagcttagcgacgacgcgcagttcaatattaacttttgggttgcagatgacgccgacggtgaaagcgggctatttcacgcgaagaaaggctaactgagcgcctactgcgcccagtctggtttattcaggatatgatcctgccagtcaaccaccgtggattctttcacagcaatatggcgaaccgagatgcgttcgccatgcatcgccgccttcgaaccggttaacagcgggtgccagtgcggcagcggttgaccttccgccagcagacgataggcgcaggtcggcggcagccattcaaacgtaggcaggttgtcgcgggtgagcttaatgcagtccggttcatattcgaaacggcgctcatagttacggcactggcaggttttgatattaagctgacggcaggcgacgttggtgaagtagatttcgtcggtatcctcatccatcagcttatgcaggcagcactgtccgcagccgtcgcaaagtgattcccactccgcatcgctcatttcatccagtgttttgtgttgccagaaaggttgttcgctcattgggatgtccgtcattgcagttcagggtgcaccttataaccagtctggcacgccgatgcaagttttgccgcccggagaaggcggcaagcggtcgttacagcacgcgggtggtcagcgaaaacccgttaaaaccgacttccagctcgtcgccgctggcgagcggccccacgccttccggggtgccggtcagcaccacatcaccggctttcagggtgaagaagcgcgacatataggcgatcagcggcacaattttatgaatcatgtcggccgtcgtgccctgctggcgcacctcgccgtttaccttcaggctcagcggcgtattctgcgcgtcgccgtgaaattcgccggcgggaataaaccccgaaatcgggcaggagttatcaaagcctttcgccttttcccacggctgcccggcttttttcattttgccctgcagatcgcgcagggtgaggtccagcgccacgccatagccggcgatggctttgagcacatgatcgtccgtcgcctgacgcagcgtgccgccaatcagcaccgccagctcaacctcgtggtgcaccgaccccagcccctcaggaagcaccaacggctggcggatatcgcatagcgccgtctcaggtttaataaacagcaccggctcttccggcgtcgcactgcccatctccttgatgtgttttgcgtagttgctgcccacgcacaccactttgcttaccggataatccagtagcgcaccctgccagttatgatgttggtacattgttttccctctgtgggttaatcagatttattcccctgttccgccaggtgtttcttgagtaaattttcagacggaggagggagctgaaggtaatagccctgatcggccagcgcctgtttcactttatccaaatcggcgtggatgagtttttttcgcccatcgagcggtaaaatcattgccagtttaggcgtaccgaagctatacattaattcgtcaggaacgcgggagaaatcgtcctttttttcgacatataaataggtttgctcacgtttagtacttcgatagatcacacaaaacatagttttactcggaattagacctgtggtcacttgcctctatatatgagtgactataacatgccttttagtcttcggaatatcaccgcacttcagcgagtgataaacagcaaattgagtaaggccaggatgtcaaatacgccaatcgaacttaagggcagtagcttcaccttatctgtgattcatttgcacgatgcaaatcccgaggttattcgtcaggcgttagaagacaaaatcgcccaggctcccgcctttttacgtcatgcccccgtggtggtgaatatcagcagcattgaagatgacgtcgactggcgccctcttcatgaggctatcgcggctaccggtctgcgtattatgggcgtaagcggatgtaaacttcctcggctgaaaaccgaaattgaccgcgccgggatccctttattaaccgaagggaaagaaaaaattacccgtcaggccgcgccagaacccgttgccccgccgccagctgttaatcagatcacaaaaacgcgcttgatcgatcagccggtacgttccggtcagcgtatttatgcgccacactgtgatctaattgttacaaaccatgtgagtgccggggctgaacttattgccgatggtaatatccatgtatatggcatgatgcggggacgtgcgcttgccggcgccggcggcgacagagacgcccaaatattttgcagcaacctctcggcggaactggtttccatcgccggggaatactggctgagtgataacattccggccgaattttatggcaaagcggcccgtctacgtttagacgacagcgctttgacgattcaatcgttgaattaatccctttttaacaaggaatttctatggcacgcattattgttgtgacttcgggtaaaggaggcgttggcaagaccacctccagcgcggccatcgctactggtttggcccagaagggaaagaaaacggtcgttatcgacttcgacatcggcctgcgtaacctcgatctaatcatgggctgtgaacgccgggtcgtttatgacttcgtcaacgtcatccagggcgatgccacgttgaaccaggcgctgattaaagacaagcgcacggagaacctctacatccttccggcctcccagacgcgtgacaaagacgccctgacccgcgaaggcgtagacaaagttctcgaagaactgaaaaaaatggattttgattttatcgtctgtgactcccctgcaggcatcgaaaccggtgcgctgatggcgctgtacttcgctgatgaagccatcatcaccaccaacccggaagtctcctccgttcgcgactccgaccgtatcctcggcatcctggcctccaaatcccgccgcgcggaaaggggcgaagatccgattaaagagcatctgctgctgacgcgctataacccaggccgcgtaaacaaaggtgacatgctgagcatggaagacgtgctggaaattctgcgcatcaatttggtgggcgtgattccggaagatcagtccgtgctgcgcgcgtctaaccagggcgaaccggttattctggatgacgcctcggatgcgggtaaagcctatgccgataccgttgaacgtctgctcggagaagaacgccctttccgcttcgtagaagaagagaagaaaggtttcctcaaacgcctgttcggaggataaattatggcattactcgacttttttctctcgcggaaaaagaacacggccaacattgcgaaagagcgcctgcaaattatcgtcgcggagcgccgccgcggcgacgctgaaccgcactatcttccgcagctgcgcaaagacattctcgaagtgatttgcaagtatgtgcaaatcgacccggaaatggtcagcgtacagctggagcagagggacggtgatatttcgattctggagctgaacgtgaccctgccggaaactgaagagtcgaagtcctgagcctgaaggtataaaaaaaccggcaacgctgtgcgaagccggtttttcactatgccgttcggcgctagcgcgggtagtcgctcaatagcgcattcaggcgatcggccatcaattctccgcgccagccggaaaccagttcaggctgcccgttgccgtttttaagcccccagtgccagttcagcagctggttaatctgtcttcttgaggccagcagctccgcgctgacgcccttctcggcgctcacggtctgcacaagcgctttaatatccttaaacagcttgcggtagcccggcatgtcgatcaggttctgcagcggctctggcagcgcctcttccggcagcgcctgcgctttctcgacaaggccgatcagcgtcttgccgtggaaacgaatttcgctgcccgagagtccgaggctgtcaagctccccgaggctggtgggcatatagcgcgccacgttccacaaatgctcttcccggatcacaaagttgacggccagatcgcgctcgcgcgctttgcgcagacgccactccgccagcagctgcaggctgcccagctgacgagtacgcagctgccaggcattaccgatatcgcgccacgcctcggcgggatcctgaatctcctgacgccgctgctgcatcagctgacattcatccagggcggcggagagccagcctgcgctgtcggtctcagccatcagctttccggcaatcggcagcaggtaccagacgtcggcggcagcataaatgcactggcgttcggtcagcgggcgcgccagccagtcggtgcgggactcgctcttgtccagcgccacgccggtaaactcttccaccatcgacgcaaagccccacgacatcgggcggccgcaaaaagcggcgagaatttgcgtgtcgatcagcggctgcggcatcaaatgaaaagcattgaggaatacttccagatcttcactgccggcgtgcagaaatttggtcacatctttattcagcagcagttcacgcatcggttcccagtcggtgatgaccagcgggtcaatcagcgaaacctggctgccgtcgaacagctggagcagaccgagctgcgggtagtaggtacgagtacggacaaattccgtatccagcgcgatggcggaaaccgcgcttgccgcgtcgcagacggcgcgaaggccatcgttggtggtgatcatctgatagttcaaatcatactctcttaacttgcgcccataaaaaacgccggcttagccggcgtctggcgattcactcttagctcaggctttattgtctactttagcacgggcttcgtcacgcagttctcgacgtaaaattttcccgacgttggatttcggcagctcatcgcgaaactccaccagcttcggcaccttgtagccggttagctggcgacggcagaaagcgatcagcatctcttccgtcagcgccggatctttcttgaccacgaaaatcttcaccgcttcaccgctgctgccggacggcacgccgaccgcggccacttcctgaaccccggcgtgctgcatcaccacatcttcgatttcattcggatagacattgaagcccgagacaagaatcatatcttttttgcgatcgacgatacgcaggaagccctcttcatccatcaccgcgatatcgccggtatgcagccagccgtccttgataatttcagcggtcgcgtccggacgctgccagtagcccagcatcacctgcggccctttcacgcacagctcccccggttctcccggcgcgacttcattatcgtcatcatccaccagcttcgcttcggtggagggcaccggcaggccgatactgccgctgtgataatcgatatcgtgcggattgacgcttaccagcggcgcgcactccgtcaggccatagccttccagcagatactgcccggtcagcttaacccagcgctccgccaccacctgctgtaccggcattccgccgccggcggagagatgcagtgaagagaaatcgagctgctgaaactctttgttattgagcagcgcgttaaacagggtgttgaccccggtcatcgcggtgaagggatatttcgccagctctttgaccaggcctggaatatcgcgcggattggtgatcagcaggttctgcccgcccagctctataaacagcagacagttcatggtcagggcaaaaatgtggtacagcggtagcgcggtaacaaccagctctttaccgcggtgcagcagcggcccgtaggtgccgttgacctgctcaaggttcgccagcatattacgatgagtcagcatcgcccccttcgccacgccggtggtcccgccggtgtactggagaaaagcgagatcctgagagacgatttccggcttaatgtactgcatacggtagccgtgctgcagcgcgctgcgaaacgagatggcgtccggcagatgatattttggcaccagccgtttgatgtacttcaccacaaagttaaccagcgtccctttcgccgtggaaagctgatcgcccatgcgggttaagatcacgtgcttgacctgggttttatcaaccaccttttcaagggtatgggcgaagttggaaacgatcacaatggcggcggcgccgctgtcgttgagctggtgctccagttcgcgcggggtgtagagcggattaacgttcaccacgatcatgccggcacgcaggataccaaacagcgccaccggatactgcagcaggttaggcatcatcagggcgacgcggtcgcctttttgcaggcctaacccttcctgtagataagcggcgaacgcccgactgcgctcctccagcttacggtaggtcatcacctcgcccatattgataaaggccggctgatcggcatagcggcggacggcgtgttcaaacagttcaaccagggattgatagcggtcagggtttatctccgcaggaacgtccgcgggataacggtttagccaaacctttttcactgcatcacctctgaaatagttattcgtcgtcatcacagcccctgatcaacaaacattttgttaacattatattaactcagcgtaccagtttattaattagccgttgtacaggttgcgaagcgcgtcactatttatttttcttatttgactgaaaacgaagaaacagcggaccagccgctgtttctttttgcttacaaagactacaaaatcattcggttacaacgtttctgacttcggcaggaccggggttataccagccccagccgccgtacccgtagccccacggacgcgggccgaacatccacgggtccatcatcggctgcggcggcatgaccacctgctggactacgttccagcgtttgtagccggtggcgttcatcagcatgaatttatacggcgtattgcccactttaccgtcgacgacgccgacgatcgggccaaccacggtaaccagctgtccgcgaaaatccaccgggtcgataaagccgttcacgtcggcaaaaatacgcccgcgcgacgcttcgcccagctccggacgcgcggcgtcgtcaagctgaacggtggcaatttccaggcgagttttaccctgctgattctgcacgctgacgaccttaccgccaaaacgcgcttcctgaccgacatacagctgcggcgcgttcatcacgcggactaaatcctgctgcggcgtcggggtggtgcccttaatggcatccggcaccgaagcgcacccgctcagcgcagcaacgactgctgccgcgactaaccaacgcactacccttttttgacccgccatgacgcgactccttccttcttctcagacatatagttactgagattcactcgcggccaggaagtttcttccacgccacttcattacgtaaataaactggctcagcgtgttcgacggccacggtttttcccgccgtaaacaggtggcaggccagcggcagcatatcctgcgcttcaggcagctgaatgtcgccatcgacgagcgttaaaccgcagtcgcgagccatatccggccacgcctgccagccggtgcccacggtggcccactcgccttccagccgctgaagccgctcgcgaaccgcttccggcttcagcaccgcctcgctctcttcgccgtgccagacgccctgctcatcgcgctgatattccgcccagtagacttcgcccattctggcgtcgatggccgccagcacgcgggtggcgccgtttttccgccacgcgccctgcgccatggtcgccagcgtagatacgccgatcatcggcagcccggcccccagcgccagcccctgcgcgataccgatgccgatacgcacgccggtgaagctccccggcccgcggccaaaggccagcgcatcaagctcggtcaatagcgttccgctttcattgaggacatcctgcaccaggggcaggatacgttgggtatgttcacgggggcagatttcaaaatgagcactgagggtgccatcattccacagcgccgcggagcaggcctccgtggcggtatcgatagctaaaattcgcatgggttgtcgcgctctcgctctagcagattgacaaaatggcgcgcagcttaccacactttgcgccggattacctcgccggcggcaccgcaagaaaacgcaccgcccggcggatatcgcgcgtgcgcggcgcaggcggaaggctagcgaggaagaccgcgccgtagggacgcatcaccagacggttgtcgcagataaccagtaccccgcgatcgtcgatgtcgcgaatcaggcgccccaccccctgtttaagggtaatcaccgcgtccggtagctggacctcgtcaaaaggatcgccgccgcgcaggcgacaatcttccatccgcgctttgagtagcggatcgtccggcgaggtgaacggcagcttgtcgataatcaccagcgaaagcgcatcgccgcgcacgtccaccccttcccagaagctgctggtcgccaccagcagcgcatttccggcgctgacgaactgctgtaaaagctgacctttgctggtttctccctgcaggagcaccggcagcgtcatggtggcgcggaactgttccgccagatcgcgcatcatggcgtgcgaggtgcagagcataaagcagcgcccgtcgttggcctcaatcagcggtttgagcatcgccgccagatggcgcgccgcgccgggctggttcggcaaaggtaaattgcgcggtacgcacagcagcgcctgatgggcataatcaaaggggctgggcagcagcagcgtttgcgcttcgccaatccccaggcgatcggtaaagtggtgcaaatcgtcattgaccgagagcgtcgccgaggtaaaaatccagctccccgatttttgcgccatcacctctttaaacttatccgccaccgtcagcggagtcagcgccagagtaaaattacgcgaagtgcactcataccagtagctaaagccgggctggttggtctctttgagccgcttcaggcggccgcggtagacggtggcccgctcaaaggcggcgtcgagcagcgccgagcgccccagcgacagctttgccacgtcgtaacagagttcgagcgcatcatcaagcagcagcagcgcgcgctgaatgttgttatccgccagcagctcgcgcaggttgccgcgatagccgggttcccccagctgcaggcgaaaatcctgcgcgctctgggccagtcggtcggcgcacttctgcagctgctgggtgtctttgagttcggtgcgataagcaatggtgatatctttcgccaggtccagcagctggcggctggagagcgactggccgaagtactggctggcgatatccggtagctgatgcgcttcgtcgaagatcatcacttccgcttcgggaatcagttcggcaaagccgctctctttgaccaccatatcggcgaggaacagatggtggttgacgacgaccacgtcagcatccatcgcctttttccgcgccttcaccacaaaacagtctttatataacgggcagtcgctgccgaggcagttatcgttggtactggtgaccagcggccaggcctgggaatcttcggccacgctaacgcaggtgctgatatcgccatcgacggtctggttagaccacgaacgcagcagaatgacatcgctgagggtttgcaccggcaggtcgccgccggcgagcgcctgctgttccagccgctccaggcacaggtagttcgaacgccctttcagcagggccagcttaccggtgtacttcagcgctttagcgacagtgggtaaatcccgactgtagagctgatcctgtagcgctttcgagccggtggagataatgactttcttattggcgcggagcgcaggcgccaggtaggcgtaggttttcccggtcccggtccccgcctcaaccaccagcggacgggtttcttcaatcgcgctggcgacggcgaaagccatctgacgctgcggctcgcgtggtttaaatcccgcaatcgcgctggccagctggccgtctgctgcaaaatcgtcgatcacattaccccctggttatttggacagtgattatgtcagggtggagtcgttttcgccagtgcgggtagtgacgcaggtgaaacattatggcagtcttgccgcagcttaatgaaccggaacaaagaggaaataaacatgaccattacgcgtattgatgccgaagcccgctggtctgatgtggtgattcacaaccagacgctgtactacaccggcgtgccgtccaaccttgatgccgatgcctgcgcgcaaaccgccgataccctggcgcagattgacgccgtgctggagaaacagggcagcagcaagtcgcgtattcttgatgcgacgatttttcttgccgacggcgcagactttgcggcgatgaaccaggcctgggatgcgtgggtcgtcgccggtcatgccccggtgcgctgtacggtgcaggcgaagctgatgaatccgaagtacaaagtcgagattaaaatcatcgccgccgtgtaagacagccgtggccccgtagcccgggcacgcgcagcgccgcccgggaaaaagccgcgccaaagccgttatccggcgcattccccggatagcggcgtaaacgccttatccggctacatagcagccaggcagatcgggcacagcgccgtcgggaggcaagaagcattgttctatcagcccggacaccacatcagctgttccttcagctgcagcgtctcctgcggcacacatttcagcgcttcacgatagctggcagattgttttgcatagccccgcactgactgcagcagcacgcgcagcgcgctatcccacacgattccctgcaggtcgctgtagggccagagatccggttcccggataaacggcaccaggtaatcaatcccctgcttcacgcctcgcccatcgcggatggcgttccagcgatcgaactcaacgtgttcggcgtagcggttgagcagcagatgcgcctccagattaaacagcgagtagtggaacggaatggtacgttccagctccatcgtctgcctgccgtcctggtcaatctgcgccgccatccgctgggtgatcccctgctcgatgatccgcgccgccagccctttatcgccataaaatagcgcgttaaccgtccgctgagcgtcgtaccaggtgccgtggttgttgtgccagacgtactcagagtggccgatgtcgctgtagtacatccagtggttaaagtcgcggaaccactggtgcaggccgatgatatcgtcggtatcaagcacgctcgccgcgttaatcaaaccgatggtgtccaccaccatccacattaagcgggtatcaataagcccggtaccgcgaccggaaacaatccccgggatcgcctggccatagttcagatgcgggttcatccgcgtttccgcatcaaggaaccagcagcggatctgcgcagccgccgcctgcgcgtactggcgctgaccggtgaagtaccacgccagcccgagggtcaggcaccgttcgcacatgcggataatgcgcgaggtatccgtgtcgttgttctcacactgcggattaatatgcccgtcgcggcgaatatagggcagcccgttgggccgccgcgggtttggccaccagtaggtccccaggctgtagtaatcgtgcgcgtcgccgctcgccgggcgcagctttttatgtaccacgctttccggcgcttcccgacgcaggatatccgcctccgataccagcttgcttagcgccagctgcagcggcgagaagggctgcttcaggcccgcccgggcgttttccaggcaggtttcgtcaagggtgtacagcttcatcgccaccttaatttccctcccggcaggctatgcgctggccgctttgcgcatcgaacaggtgcacgccggcgagcttcggctgcagccagatcttatcgccctcttttacggccagacgctgtttgaacaccgatgtaaacgccccgccgccggtatcgcagaagagctgcatatccgagccggtgttctccaccgccgtcaccttcgccgccagcgcatcgtcccgcgcttcatgaaccacgttgacctgttcggggcgaatggcgtacaccacctgctggccgtcggtgacccgtaaaccggcgggcaaagccaacagggagccatctttcagacgcaggctggtggcgctaccgttcaagaccacgacgcccggcagctggttaatctccggcgagccgataaacccggcgacaaacagattcgccggccggtcgtacagttccagcggggtccccgcctgctctattcgcccgtcgcgcagcaccacaatcatctgccccatggtcatggcttcaatctgatcgtgggtgacgtacaccgaggtggttttcagccgacgatgcagttcgcggatctcgccgcgtacctgggttcgcagcttggcgtcaaggttggagagcggttcatcgaacaagaacacctgcggcttacgcacgatcgcccgccccatcgccacgcgctggcgctggccgccggagagatctttgggcaggcgctccagcagcggctccagccccagtagcgccgccgcttcattcaccttctggctgatttccgctttcggcagcttagccatcttcagggcaaagcccatattttcacgcacggtcatctgcgggtagagcgcatagctctggaacaccatcgcaatgtcgcgcagcttcggctccacctcggtaacgttacgctcgttgatatgcacttcgccgccggagatctcctccagcccggcaatcatgcgcagcagcgtggatttgccgcagccgctggggccaacgaggacgcagaactcgccgtccggaatcgtcagcgacacatctttaatgacgtgggcatccccgtatgatttgcgcacgctatttaatacaaccgatcccatcgttaaccccttatcctttgaccgcgccggacataatcccgcgattgaaatgtttttgcagacccagatagacgatgatgctgggcagcatcgccagcagcgtaatggcgataaaaatgttcggcgtgatgctctcatcggtacgcagcgtaccgaggatcaccggaatggtattcaggctgtcctggttgaccacaatcagcggcagcaggtactggtcccaaatcataataaagccgaaggtcaccaccgtgccgagcgccggttttaccagcggcagaatgacgtggaagaaaatctgccattcgttggcgccgtcaatccgcgccgcctcctccagctctttcggtatcgctgacataaattcggtcaggacaaagatggagaacgcccagccgacgaccggtaaaatcattccgagatagctgttgtagagcgaggcgtcgatcagcggcagccgccagttgataatcatgtacagcggaatggcgatgacctcttccggcagcatcatggtggacaaaatcaccaggctcaccagcgctacgccgcgaaacttcttccgcgccagggcgtacgccgccagcgcgctgaccgacacctgcagaacggtgccgaagaacaccaccagaatggagttcagcagatactgccagacgccgatatccatccacgcgaagatgaagttttccaacgagaactgatgcggccaggccagcagctcgcccggcttcacaggcgcgccgctgaatgccgtggcgacgatgccccagaacggcccgacaaagacaatcagcagcagcgcgtagatgcaccagcgccctgctgtatcccaacgtttgcttaacatcgcggctccttagtaacgggcgatacgttttttcagcgtcaaatgacagatggttaagattacggtgaaggtaaacagcaggaacgacaccgccgaagcgtagccatagtcaaactgctcaaagcccagcttgtagatgtgggtcatgaccatttccgtggcgttagaaggtcccccgccggtggtggcgtacacctcggcaaacacgcggaaaccgcgaatgaaggagagcatcagtaccaccgagagcgccgggatcatgccgggcagcgtgacgtagcgcaggcggttccaccagctggcgccgtcgacgttcgccgcatcgtataaatcgcggctgattcccgccaggccggcaataaagatcaccatgttgtagggcaccgctttccagatatgcagcagcatgatgacgcccagcgcctgatcggagctggcaagaaagccctggtcggcgacgccaaaccagctgaggatgtggttaaccacgccgttgggcgtcgggttaaacaaaatgcgccacatttcggcgacgatcgccgcgctggtaaccgccggtaaaaagatggcggttcgaataaagcgcagatggcgcgccgggccttccagcagcatggcgaggaaaaacgccaggatagccgcggcgaacatcgttaccaccacgtaaagcagggtattcaccaccgccgcgtgcagctctgcgtcggcaaaagcgcgggtgaagttatcgagccccacccactcgttgggctgattaaagttaaccttgtaaaagctcatcaccagaccctgaatcatcgggataaacttaaaccagctaaagataatcagcgcaggcgctaaaaacagccacgggatcagcgcccgcttacgctttgcgctcagccatccggtcgagtcaggcgaagcggcctgctttatcggcgaggacttcgtctcatgcagcgtcataacctatgtcctcagttagccagcacattttgttttttcagctcagcgttcaccttgccgtcgagcgtcttcagctcgccgggaatatcgctgccgcagtcggcaaaaatccggttaaaaccgtcggcggccacctgacgcaccggcgtccagttgggaatttgcggcacgtagcgtccctgttcattgtaaagtctggcgaaagtttcccagcgcgcgtcctgatacacggctttgacgtcgacgttcttattcaccggcagacgcactaccggaatatgctgactgcctttacccatgccgatctcctggccttccgcagagatcataaattcgataaattttcgcgccgcctctttctgtatgctgctcttcatcataaagaccgtggtgccctcggcgagggtggcttcgcctttcggccccgccaccgggatcacttcgaagttgtctttaccggggtctttatcgaacagcgcgatatggtacggcccgctgaagaacatgccgctttgcccggagcggaaggagggaataacgtcggcggtggtggcgttaatcgcgcccggctgggtgactttgtcgcacatcatggtgcgcataaaggtcatcgcctgagccacttccggcgtattgagcgaagcgctgaattttccgttctcttctttaacgaaatcaccacccgcctgccagataaagctgctcataaaccagctggcgtagccgcgcgtcgtggaagcgggaacgataaagccgtaggtatcatttttgccgttaccatcgggatcctgagtggtgaaggctttcgccagcgtctggatatcatcccagctcttaggctgcggtagccccagtttttcacgccagtctttacgcacgaagagcgcgaaagtttgcgccgaggtcggcacgccgtagtacttaccgtcgatatagcgggtactcttccatgccgtctggaatagctggtcgccgcccgcgatcgtctgcgggtcaatttcttcggcaatacccagctggatgaactgccccagcgacgccgcatcgttaaaaatcaaatcgggtaaggcgttgcccgccgtggcgcgcgccagccgctgttcaaagtcggtggtggcgttgaaatacgcgattttgataccggttttttcttcaaatttttccgcctcctgtttgtagatattcttcgagtcattgctggcgcggatccagacgttgagagtggtggcggcgtaactttgactaacgccgagcccgagtgcggtgagaagtaacagtgaacgtaatttacaggcagacatgatggcatatcctttattgtagggcacaaaggtaattaaattctcaattaatacacgaaaaagaatttgaatatcgctcaggcgttaatacagctggcgcaagaattatttccattcattagatagaaatgtatttcctaatacaaccgtataaaaaagaaattgcgtttcaaaaacaagaaaattgagacagatcacacatggaagtgacaaaaaaagtgacaaaaaataaataaccatataaatcaattgattataattttactaattttgttaatagattcaaaaaacagagaaaaacggcaaaaaacgtgatgtacgctgcattaaaagcgtcattatttatccaaaacgttaaacttgaaggacatcacaaaaaaaatcactttgtcttttacactgctcgccatcgaatatttaaatatattgtttttaattacaccgcctgtttcacgcgttctttaaatacgcgtcaggtataattctgttgttatcttttctcatatttgcagaagggttatcacgatgaactcaatacctcgccgaggtttgttaggcattgcgctgttttgttccggcctgagcgccgcctcgtatgccgccgagccatatacgctagacggaaaggatttagcctttagccggcagcagatcgccgcgaaagatccgctatttgttcaggcgcaagcggcgctgctaaaaaaagccgatctggcgctcaatcatccgctgttctcggtgatggataaaacgctggtcgccgccagcggcaataagcacgactactacagctttccgccttactggtggccgaatcccgataccaaagacgggcttccttatattcgcaaagatgggcaaaccaaccctgacgccaatagcgacgccaccgataagaaccggctggtgaagatgagtaacgacgtgtcaacgctggcgctggcgtggtacttctctcacgacgaacgctacgcgcaaaaggcggcggcgcagttaaagacctggttcctcgatcccaaaacgcgcatgacccccaacctgcagcatgcccaggccattcccggcatcaataccggacgcggtatcggcattattgatagccgcgcgctggttgacgtcgttgacgccatcgccctgctgcaatcctccgatgcgctgagcgaaaacgacgttagcgcattgaagcagtggtttggtgactattatcactggatgaccaccagccagaacggctttgaagaagagaactggcataacaatcacggcagctatttcgatatgcaggccgccgccttcgccctgttcagcgggaaaaccgacgaggcgaaaaagcgcctgtacatcacccagctgcggcgtattgcgggacaatttgatattgaaggccgccagatggccgaactggagcgcacgcgcccgtggcactacagcaattttaaccttgaagcctacaaccgcctgggaaggctcggcgagaaggcgggcgtcgatatctggaacttcaccctcgacgaccatagcctgcgcaaaggctatcaatacatcgccgggtttattaacagcgatacgccgtggccctggaaggacctggataaaatggatgacaagaaagcgctgcgcaatatcgccaccgccgcgcacgcctggccggaagatccgctgttccgtgacaaagcgcagtggctgcgggcgaaataccccgacgatatcactacgctcatcgccccgctttccgcatcgtcagaggtcagggataaccgctaatgaaacaattctccgggctctggcccgacattgtcggacgtgcagccgcgaatagcggactgcttgaacggctggtgaaggatgctcagccggtattagatgcagcggttcgcattccgcagtcagggatcgccagctggaatctctactacttttgtccgcgccacggcgtgcgcctggcgtggcgggcggatacgccccaccagcatgcctgcccggtcgatggggaaatatttagcggtgaaccgtgggatggcgcatggtggcgcgagatgaatggccgtaacgccagcgcctgtcagcagcttggcctgttatggcggctgaccggcgaaacggcgtatcgcgataaagttcgcacgctgctgatgggctacgcggatgtctatcccggctatgagatccacggcgatattcccaacaacggaccgggcaagatgaacgcccagacgctgtgcgaagccaactgcattctggaaatggcgctgggttatgacttcattcgcgacagcctggcgcccggcgagcagcggcacatcagtgaaaacctgctgcgctgcgcggcagcgtttttgcgcaaccatcgtagtccgcagatccataaccatgaggttaaaatcagcgcggcgcttggcgtactgggtttcatcctcgaagatgagacgctgctggagtttgccgtgaaccaaccgtacggcctgcgctggcagctggaaaatggcctgctggcggaggggctatggtttgaaggctccgttcactatcactactacgcgctgcagggctttctggcgtttgagaagctggcgcgcggcacccgctggagcctgctggacggcccgtggtatcaggcgatgctgacgttcccgctgtcgctgctgctgccggacggcaccttcccgcggcttaatgactgcctcgccgggcaggagaagctcaaccatcgggatctttacgagttcgcctggtttatctggcgtgacccgcagtacgccgcggtgctgcagtttaccgaaacgacgcccgacgagcgtgaaaccttactgtggcgcgaacaccccctgccggaaacgcccctgccgctgatcccgcagcagtcgctgtttgcgcccggcgccggcctgacgttatggcggcgaccgcagcaggcgctgctgattaagcacagcccctggggcggcgagcacgaccattacgacaggctggggctgatgctctggcatcgcgacggctggctgctcacggatatgggcaccaccggctacggtgcgaaaatgcactatgactattacaaaaacagcgccacccacaatacgctttcggtcaatcagaccaaccagcctccggccaatccgcaggtgctaggctggcatatggatagcgactctctgtggctggatagcgaggttgactgggggaagccgccgccggagctcaacagccatagccgcgtagagtgggacgcggcggcctggcgaggcgtgcgctttcgccgtcgcctgctgtggcttgaagaggtactgatcgatctctctacggtggaaaatccgcatcgccagcagcttgactggacactgcacctggcggcgcgggcgctggaccagagcggtacgccgcagcctttttcgctcagcggaccgctgcggcatatggccaatgccaccatgaccccgctgaacggctgccagccgcgccactttgcgcgcgacaaagacaccgttgcgctctggctttccggcgatggtgaactctggcaagggctggcgcccgataacccggcgattcgcgatctcagctatctggtgatgcgcaatcacctgccgcaggcgcgtttcgtctgcctgtgggatttcgctaaccgcgcgccgctgacggaggtgaatgtgcaccatacgccagccggtacgcacattaccttctggcgcggcgatcgcgtcacgcacgtgacgctgtacgacgatcccgggaaacgacctgatgcgatccttccgctcccggaaagcggcatctgatcgcaacgggggatttactcgtcttcatcctcaaagcgcgccacaatccgatccccggtatgcgaggcgcgcagttcatccgccactaaagcaatcgcctggccgctgctcatgccctgcgacatcagctcctgaattcgttccactgctttttgctgctgctcgtggctcagcgaaggtaaacctgcaaacatgactgactcctgctacattgtggggcgtaattatttcacgccgtccgcgcgtataccagcggacggtaacgatcaggattgaagaagacgatgttgtcccccgcaatgatttccctgccctggcgcccggatgccgctgaatactattttagcccgttaagttcccagccctgggcgatgctgctgcattccggttttgccgaacatgcgcataaccgttttgacatcattgtcgcccagccgcgcgccacgctggtgactcacggtcaactaaccaccctacgcgaaggggaaaccgtctcaacctccgccgccgatccgcttacgctggtgcatcagcagctggcgcactgtaacctgcagccgcagcctcatccgcatctgccgtttctcggcggcgcgctgggactgttcggctacgatttgggtcgtcgttttgaacatctgccggcgcgggccgacgcggatatcgaactgccggatatggcggtaggtatttatgactgggcgttaatcgtcgatcatcagcgccgggaggtatcgttattcagctatgacgatccgcaggcgcgcctggcgtggctggaagcacagactgcgcctgtcgctgcaacctttaccctgacctcagcgtggcgcgctaatatgagccgcgaggagtatggcgagaagttccgccagattcaggcttatctgcacagcggcgactgctatcaggtcaacctggcgcagcggtttacggcgagctatcgcggggatgagtggcaggccttccgtcagcttaaccgcgccaatcgcgcgccgttcagcgcctttattcgcctggatgaaggggccgtattaagcctgtcgcccgagcgttttattcagctccggcaaggcgacattcagacccggcccatcaaggggacattacccaggctggccgaccctgagcaggacgcgctgcaggcgcaaaagctggcgaactcgccaaaagaccgcgccgaaaatctgatgatcgtcgatttaatgcgtaacgatattggccgggttgcggaacccggtagcgttcgcgttcctgagctgtttgtggtggagcccttccccgccgtgcatcatctggtgagcaccgtcaccgccaggctgcccgctcatctgcacgccgccgacctgctgcgcgcggcctttcccggcggctcaatcaccggcgcgccgaaggtcagagcgatggagatcatcgatgaactggaaccgcagcggcgcaacgcgtggtgcggcagcatcggctatctcagcttctgcggcaacatggatagcagtatcactatccgtacgctgacggcctggcagggacacctctactgctccgccggcggcggaattgtggccgatagcgaagaggcagcggaatatcaggaaacttttgataaagttaatcgtatcctgcatcaactggagagctagaacatggcggacagcgccctcgaacttgacgatttcctctcgcgttttcagcttctgcgtccgcagcccacgcgccacgcgctcaaccagcgccaggccgcggtgctggtaccgatagttcgccgcccgcagccggggctgctgctgacccagcgttcgccgctgatgcgcaagcatgcgggtcaggtggccttccccggcggcgcggtagataacagcgatgcaacgctaatcgccgccgcgctgcgtgaagcgcaggaagaggtggcgatcccgccggagtcggttgaggtgattggcgttctgccgccggtcgatagcgtgaccggctttcaggttactccggtggtagggattatcccacccaatttgcactatcacgccagccaggatgaagtggccgcggtcttcgaaatgccgctggccgaagcgctgcgcctggggcgctaccatccgctggatatccatcgccgcggcaattcgcatcgcgtctggctctcctggtaccagcattattttgtctggggaatgaccgccggcattattcgcgagctggcgctacagataggcgcccgtccttagctatactcaaactgagacggcgttctcagcattagtaaatccgcggttatccattagtttaattcatgtgaatagataagctgatgacccggttccctcttacactatgcgcagtgattacatcgttgtcgcacccgcgacaaccctgtcaggagtgttagcgtgattagtatattcgacatgttcaaggtggggatcggcccctcatcttcccatactgtagggccgatgaaggccggtaaacagttcgtcgatgacctggtcgaaaagggattgcttaatgaagtgacgcgcgtggcggttgacgtctacggctcactgtcattaaccggcaaaggccaccatacggatatcgccattattatgggactggcgggcaatcagcccgatacggtcgatattgacgcgataccggcatttatccgcgacgttgaaacgcgcggtcgcctgctgctggcccaggggcagcatgaggtcgacttcccgcagaatgacggtatgcgttttcgcagcgacaacctgccgctgcatgaaaacggcatgaccattcatgcctgggctggcgagaaagaaatctacagcaaaacctattactccatcggcggcggttttatcgtcgatgaagagcatttcggcaaagagagcgccagcgaactcgccgtaccctatccgtttaaatccgctcaggaaatgctgggctactgtaaagagaccggcatgtcgctctccggcatggtgatgcagaatgagctggcgctgcacagcaaaaaagagattgaagactattttgccaatatctggcagaccatgcgcgcctgtatcgatcgcggaatgaataccgaaggcgttctgcccggcccgctgcgcgtgcctcgtcgcgcctcggcgctgcggcggatgctggttgccagcgataaactctcccacgatccgatgaacgtggtggactgggtcaacatgttcgcgctggcggtcaacgaagaaaacgccgccggtggccgcgtggtgacggcaccgacgaacggcgcctgcggcatcgtaccggcggtgctggcttactacgaccactttatcgagtccgtcagcccggatatctatattcgttacttcctggcgtcaggggctatcggcacgctgtataaaatgaacgcgtccatttccggcgcggaggtgggctgtcagggcgaagtgggcgtggcctgctcgatggccgctgcgggcctggcggaaatccttggcgccagccccgagcaggtctgcgtggcggcggaaatcggcatggagcacaacctcggcctcacctgcgacccggtggccggccaggtacaggtgccgtgcatcgaacgtaacgccattgcctccgtcaaagcgatcaacgccagccggatggccatgcgccgcaccagcgagccgcgcgtctcgctcgataaagtcattgagaccatgtacgagaccggtaaagacatgaacgccaaataccgggaaacctcgcgcggcggcctggcgattaaagttcagtgcgactaatccgtgtcctacagaatgcgcccccgggcgcattcttctttttccacgctatattattatctgcgcccactacacttgctctataacggctgttactctcattaacacttttagccgacagggcgtcgcgcatgcagactgcacaaaaagttatcacaacctaccgcaggaaacgtatcctggtttgcttgctggtcgcgctactgaccctgacgacaacattagtgatacgatttatttcgcagcgtagcttaaatcagcagcgcgtccagctcagcaccaataaaatggtggccgcaatggataatattctgcggcccctggcggcccagcacgccacgctgctgcaacttgtgaaccagccctgtcaggacgtccacctcacgttacgtaagctggcagcatcgctgcaaacggtacgttccatcgcgctggtccagtctgacctgctctattgctcgagtatttttggccaacgaaatattccggttcaccagttacagccggcgctccccgccaaccacgccctgcttaccttcagctacgacgcatcgctgcttaaagggacgccggtacttatccagtggtatcccgcttcgcttagcggcgccgacggtgtgctgctggtgatcaatatcgagctgctgggcgagttaatttttaacgcaaaatcgccattaattaccggaattggcctcagcgttggcgataaaagctttattagcggttccgggctgattaaacaggaatccttgcctggcgagcaaatcatctaccgccagtcgtcgacgcagtttcccttcaccattaacgtcagcgggccgggcgcctcagcggtcgccctcaatgagctaccgggcgaactgccgctggcgctgataatcagcctgttaatgaccggcatcgcctggctggcgaccgcgggaagaatgagcttttcccgggaaattaatctcggtattgccgcccacgagttcacgctttggtgccagcccctgcaggacctgcgcacccgtcagtgctgcggcgtggaaatactgctgcggtggaataatccacgcagaggcgctatttcgccggaggtgtttatccccatagccgaaggttataatctgatcgttcccctcacccgctatgtcatctcccaaacggcccacaaattagccctttttccgcaggacacacattttcacatcagcatcaacgtcgccgcccgccatttcgccaacggcgaactgctgcgcgatctgcatcactactggtttagcgcccatccggtacagcagctggtggttgagctcaccgaacgcgacgtactccaggatggcgatcaccatatggccgaacatctccattttaagggagtaaagctggccatcgacgatttcggcaccggcaacagctccctttcctggctggaaaagctgcgtcctgacgtattgaagatcgataaatccttcaccagcgcaattgggattgatagcgtcaacgcaacggtgaccgacatgatcattgctctcgcccaccggctgaagattgtgacggtcgcggaaggggtagagacccgggatcaggaagagtatctgcgcggcaacggcgtcgatttattgcagggattttactacgcccggccgatgccggtagaggactttccgcagtggctggcggcggaaaagcatcgggagctgaacgcttaaaaatgcccggcggcccgagggccgacgggcatcaaccgttactcttcttcgtcgttatactgtcgcagcttgacgacccgtaccagatcgacgcgatagtcgttggcttcaacaatcgtgaactgcaaaggtgacagttcaagcacgtcgcccggacgcggaatatggccgttgacggcaatcaccaagccggcaaccgtggcaatatcttcgtcctcatcgaccagatcgtctacccccaacgcctgctgcaacgcatgcacgtcggttgaacctttcaccagccagccgtcgccgtcgatgacaatttccggcgtttcgtcagcgtccgggaactcgccggcaatcgcctccagtacgtccagcggcgtaaccagcccctgtacgacgccaaactcgttagtcacgatgacaaagctaccgcgggcgcggcgcagcacgcccagcagattgatcgggtccaaagtttccgggaccacaatcgccggcgaggcggaagccagagcggcaacgttgtcacccgcttccagcgccaccagcatctctttcgcccgcacgataccgatgatttcatccagctcgccgcggcagaccgggaacaggctgtgcggtgaagagagcagctgacggcgaatttcctcttcgctttgctcggcgtttacccagctaatttccccgcgcggggtcataatgctgcgcaacgaacgctgggccagggtcagcacgccgttaatcatgtagcgctcttcttccgcaaacgcgccttcggggatcggcacgacggacgcgctatcgctatcatgcgccgcggcgctttgcttacgcccgcccatcagacggaggatcgcatcggcagtgcgcgcgcgcagaggcagggtcgattgatgacgaataaagttacggcgcgcaatctggttaaagaactcgatggttatcgagaagccaatcgcggcgtacaggtaacctttcggtatatggaaaccaaaaccttcagccaccaggctcaggccgatcatcagcaggaagctcagacagagcactaccaccgtcggatgctggttgacaaaattagtcaacggcttcgaagccagcagcatcaccgccatcgcgatcaccaccgccgccatcatcaccggcaggtggttaaccatcccgaccgcggtaatcacggcgtccagcgagaacacggcgtccagtaccacgatttgtagtaccaccacccagaagctggcatagcctttaccatgaccggagtcatgctggcggttctccagccgttcatgcagttcggtggtcgccttaaacagcaggaatatccccccgagcagcatgatcaggtcgcgtcctgaaaacgagaaatcggcaacgctgaaaagcggtttcgtcagggtcaccatccacgaaataaccgacagcagacccaggcgcataaacagcgccagcgagaggccgatcaggcgcgccttgtcccgctgctttggcggcagcttgtcggcaaggatggcgataaacaccaggttgtcgatacccagtacgatttcaaggacgacaagcgtcagcaaaccggcccaaatagagggatccattaagaattccatgagcagctccagttaacggcaggcgtagtcatcgctgtgtcatgcacagacgagacacttgttgctggtgaaaagacgtagcaggtggcggcggcaaacgcgtgccggaaggtgaaaagacgtcggtgacggtccatatagcgggctatgccctatactcctgagtaattaaacggaacgtaaacatagcaaaatatagagcataattggaaaaaatttacctgtctttgcaatagctaagagtattttttgcgctgcaaaataattaccaacagatgcataattagcggagcttcatcacattaattattttttcactgtctaaaataattcgctgtagtaattactttatatcttacacccttactgaatcgattttgttcgcaagagtgattcaggatgtatcagaacagatgatgcattcacgattataaaggaggtagcaagtgacgattgctattgtaataggcacacatggttgggctgcagaacagctgttaaaaacggcagaaatgctgctgggcgaacaggaaaacgttggctggattgatttcgtccctggcgaaaacgcggaaacgttaatcgaaaagtacaacgctcagctggcaaagctggatacagcaaaaggcgtgttatttctcgtcgatacatggggaggcagcccgtttaacgcggccagccgcattgtcgtcgataaagaacattatgaagtcatcgcgggcgttaatattccgatgctggtcgaaacgctgatggcgcgtgacgacaacccgtcgttcgatgagctggttgccctggcggtagaaaccggtcgcgaaggcgttaaggcgctgaaagcgaagccggtggaaaaggccgcccctgctccggttcaggcggctgccccgaaagcggctgcgccattgaagccaatgggtccaaacgactacatggttatcgggcttgcgcgtatcgatgaccgtttaatccacggccaggtcgccactcgctggactaaagaaaccaacgtttcccgcattatcgtcgtcagcgacgaagttgcggcggataccgtacgtaaaacgctgctgactcaggttgctcctccgggcgttaccgcccacgttgtagacgtcgcgaaaatgatccgcgtctataacaaccctaaatacgcaggcgagcgcattatgctgctgttcactaacccaacggacgttgaacgcgtggttgaaggcggtgtgaaaatcaccagcgtcaacatcggcggcatggctttccgccagggtaaaacgcaggtgaacaacgccatttcggtcgatgagaaagatatcgaagcgttcaaaaagctgaatgcccgcggtatcgaactggaggcccgcaaagtttccaccgaccagaaactgaaaatgatggatctgatcgccaaggtgaaataagtcaccccgcggatcgcaacgcaattttcaacttaagacttaatcaacaggagaagtacaatggagattacctttcttcagattgtgctggtgttcatcgtcgcgtgtattgcgggtatggagtcggtacttgatgaatttcagttccaccgtcctctggtggcctgtacgctgattggcgccgttctcggggatatgaaaaccggtattattatcggtggtaccctggaaatgatcgccctgggctggatgaacatcggtgcggccgttgcgccggatgccgcccttgcttccatcatctctaccgttctggttatcgccggccatcaaagcatcggtgccggtatcgcgctggcaatcccgctggccgcggcaggccaggttctgaccattatcgttcgtaccatcaccgttgccttccagcacgcggcggataaggccgcggagaatggaaacctgacggccatatcctggctgcacgtttcatcgctgttcctgcaggccatgcgtatcgctatccctgccgttatcgtggcgatttccgtcggcaccagcgaagtacagggtatgctgaacgccattccagaagtggttaccggcggtctgaacatcgcgggcggcatgatcgtggtcgtcggttacgcgatggtcatcaatatgatgcgcgcaggctacctgatgccgttcttctacctgggctttgttaccgccgcgttcaccgatttcaacctggttgctctgggtgtaattggtaccgtgatggcggtgctctacatccagctgagcccgaaatacaaccgcgtagcgggtgcgcctgtgcaggctgctggtaataacgatctcgacaacgaactggactaacaggtgagcgaaatggttgatatgactaaaaataccaccgagaaaaaactgactcagagtgatattcgtggcgtgttcattcgttctaacctgttccagggttcatggaacttcgaacgtatgcaggcgctgggcttctgcttctccatggtgccggctattcgtcgcctgtatccggagaacaacgatgcgcgtaaacaggcgattaagcgtcaccttgagttctttaacacccatccctacgttgcggcgccggttctcggcgtaacgctggcgatggaagagcagcgtgctaacggcgcagagatcgacgatggtgctatcaacggtatcaaagttggtctgatgggcccgctggccggcgtgggcgaccctatcttctggggtaccgttcgtccggtgttcgccgcgctgggcgcaggtatcgccatgagcggcagtctgctcgggcctctgctgttctttatcctgtttaacgcggtgcgtctgctgacccgttattacggcgtagcgtacggttaccgtaaaggtatcgatatcgttaaagatatgggcggcggcttcctgcagaaactgaccgagggggcgtcaattctcggcctgtttgtcatgggggcattggttaacaagtggacgcacgtgaacatcccgctggtggtttccaccatcaccggtcaggatggccagacgcgcgtgaccaccgtgcagactatccttgaccagctgatgccgggcctggtgccgctgctgctgaccttcgcctgtatgtggctgctgcgcaagaaagttaacgccctgtggatcatcgttggcttcttcgtcatcggtatcgcgggctacgctgtcggcctgctgggccagtaatctacacgctgtgcgccgggggcttgcccccggcttttttatttggaggatggatgacaatcacggacctggtgttaatcctgtttattctcgttctgctcgcgtttgcgatttacgatcagttcatcatgccgcgccgcaatggccccgttttgctggctatccccctgctccgccgcaatcgcgtcgatggcattatcttcgtcggcctcattgctatcctgatttataacaatattgccagccagggcgaacttatcaccacctggctattatctgccctggccttgatggggttatatcttttctggatccgttcacccaaaatcatcttcaaaaaagaaggcttttttttcgccaatatctggatcgaatataagcgtattaaagagatgaatttatcggaagatggcgtgctggtcatgcaattagagcagcgtcgcctgctaattcgcgtacaaaatatcgacgacctggaaaaaatatacaaacttctcatttcaactcaatgagttacaaatatagcctgcgctatattttgtcattccccggcgaatggaatatagccgcggctatattccattcgtttaattcgccgatatttattaacgaattattcacttctaaatttaaatgaaaatcgttatcatttggttagcaaaataacctgactccgttattgttttatattctaaaattatgttaaggttgcgcccgtcgttggggagtagccaattttctgcctgccagaaaatgtacgtgtcaacatactcgttgcaaaacgtggcacgtacgggttgaagaagaacgtcttcaatcaggcgagaccatagacgcatcgctgctgtacgcggcgcctcatcttcaggatgggctgcgtatttttactgggggcggcgatgtgtcatatggattatccccggtcaggacgctctcatgaatgtatccgctacaattcttcttgccttcggcatgtccatggacgccttcgcggcctctattggcaaaggcgccactctccataaacctaaattttctgaagccctgcgcacgggtctcatctttggcgctatcgaaacgctcacgccgctggtcggttggggaatggggatgcttgccagccagttcgttctcgagtggaaccactggattgcctttgtgctgctggtgtttctcggcggtcgaatggttatcgaagggtttcgcggcggcaacgacgacgactgcgaaactccgcgacgccacggtttctggctgctggtgaccaccgcattcgctaccagccttgacgccatggccgtcggcgttggcctggcgtttctgcaggtcaacattatcgccaccgcgctggctatcggctgcgccacgctgataatgtcgacgctcggtatgatggtgggacgttttatcggcccgctgctcggcaaacgggcggaaatcctcggcggtatcgtgctgattggcatcggcgcccagatcctctggagccatttcgccggctgatcctcaggcgtcgcgctgccagcagtgaatggcaaaatcggtctggcagccgaatcccacctgttgacgcagcgcttcccgaaccggcggcttagcccgccacgcaaacggcgtcatttgcagtaaagcttccgcctcgctgccgttaagctgcatcggataggccagctgctgctggtgacgtagcgtaaaccctgccatctcttccgcgttttgctcgtgcaaacgcacttcgtcgtatatcaaccctttcagctccatcaggtgacgaggccccggcgtcgcggtgatgacccagccgccggggcggacaacgcgcgccagctcaacggcattgcagggggcgtaaatacgtactatcgcatccaggcttgcatcctcaaacggtaaacgctggctggaggcgacgcaaaagttgacctgcgggtaccgttttgccgccgcgcggatagcggatttcgacacgtccagaccccagctgcggctggcgatggcggcaaaagcgtgcgtgtagtagccttccccgcagccgatgtccagtaaatcggtcggagcgaaagtgtgcagataagcgcagatcgcgtcgcgaagcggctgataatgacccgcatcgagaaacgcccgccgggcctgcatcatttcagcgctgtcgcccggatcgcgggagcgcttaaactgcaccggcagtaaattgacgtacccttccttcgccagatcgaactgatgccgctgcgggcagataaagctattatcgcggcgctcaagcggcgcgtggcaaagtgggcaactgtaagacatggcaactccggtgtgctgaaagggcgaaagtgtagcgctattcgcccctccaggccaccgttacagcgcaggcggcagcacgccgtcatgatgcatgacgatcaggttttcagaaccctgcggcatcccatctggcatcacgttttccaggcgcaggacatcgcccatgatctggctgaataccggcgccgacactgctccaccgtaatacgaaccgttgctggggtcgttcatcaccactaccagcgcaaattttgggttactggcgggcgccacccctgcggtataggccacgtatttgtcgatatatttcccgtcagggccaattttcttggcggtaccggtttttaccgccacccgatagtcgcgcaccgccgctttggtgcccccgccgcccggcaaagcaacgctctccatcatatgttcgacttcatgcacaatctgctccggcatcactcgggtgcccatgaccggcggatcgatacgcgtgatcgatagcggacgctcaataccgtagctgccgatagttgcgtaaacgtgcgccagctgaagcggcgtaaccatcaggccgtaaccgaaggcgaatgtcgcccggtccagctgtccccagtagcgacgctgcggcatcagcccggcgctttcaccggttaatcccagaccggtagagtcgccgaaaccgaacgctttataggtatcgataagatgttgaatcggcatggccagcgacaaatgtgaaacgccggtatcgctggatttttgcagaatgccggtgagggacagctcagggtagtaaccgacgtcgcgaatacgatgaccgtcgagggtaaacggatgggtatccaccacgctatccggctgaacaatgccctgctggagcgcggtcatcagcaccagcggcttaaccgtcgaccccggctcgaaagtatcgctaatcgcgcgattgcggaaatcatccagcttcgcgtcatcgcgattgttagggttgaaatcggggtagctggccatcgacaggatttccccggtatcaattttaattaataccgccgcccctgattccgctttgttccagcgcacggcgttatccagcgcgtcctcggtcaccgtttgcagacgctcatcgatactgagctgcaaattgtgggccgggaccgccgggacttcggtgatattttcgatgacgttgccgtgccggtctttgcgcaccagacggcgcccgggctgaccggttagctgggcattaaagcttttctctaccccctcgatcccctgattatcgatattggtaaagcccagcagattagccgcaacgtgccccgcgggataaaaacgacgcgactcatcgcgcagattaatccccggcaggtgcagcttgtcgatccactccgcctgctccgggtttatctgacgcgccagatagagaaaacgcgcatgaggatgcgcctgcacgcgatgggcaagctcgctaaggttgaggtgtaaagcttgcgccatcgcctgccagcgcgggccatacccgacgccgccttttgcgagagttgtttgcggatcgatccagatggcgctcaccggcacgctaaccgccagcgggcggccctcgcgatcgctaatcatgccgcgctgcacgtcgataggctcttcgcgcaaggagcgcatatcttcttgtttaaccaaattgtcgggagagacaatttgcagccagcctacccgggccagcagcagacccatacagcaaagaatggccacgcataacaacccaaaccgtaaaggggtaaagttagcggctgacttaagtttgttcttttgcaccttagctccatcattattttgcaaccacctgatttaacagatatatacaaaacaggttgctaaacagtgctaataaggatgttgttttgcaacaaagcgcaacagagggaggaaaaatgacatgatttgcaataaagactaaaaagccccgcggctgcgaggctttcttacaagattcagtggtctaaatcagatagcagttacgttaactgcagctggacctttctggccgtcctgaatttcgaactcaacgttctggccttcagccagagttttgaagccgttaccctggatagcggagaagtgtacgaacacatctttgctgccatcagccggagtaatgaagccaaaacctttagactcgttgaaccacttaacttgacctttaatctttgccatttgcaaaattccttagactgttttcttcgcccgtggggcacttacatagataaaactgacacatgactgcatgaggcactaatataaggttcggcagagaagcggtattcaacgacaacgtgtttactcaggacttctttactgaaaatgccacacataaacagaactgtacctcgtttaacccgaaaggtgttatcacatactacgtaaataatggcaagccatttttagacggctctcgatcgctcgcacaaattataagggaatcatttgatcacctgcacatttatgcgactttgcttcctctggcttatccttctccctccgcgctggcgccgctgagacggccccctgcctgggagtttatccgccattgctcaatgacttcagcttgccgggccccgcgtagagccaaactgccaattttagggggagtcagaaatcattgcataaagatgcatttaaaagctcatatcgatagttgaaaaattgctttaccggcccatggcataatatcgaagcgcgttaattgaagtacttaaaatattgtctatacttcacggcaataatgaacgcctgatgacagtcaggtctttcctgttcttttatttgatgaattaaacaaactaattaaagagagcataaacgcgccgcctccgcttgccggtgggcaggtttacggtcggaagagaatttatcgataaggatacgttatacaccgggggagatacaggcgcacaccgtcacgatgtacacctgacaatcagattagcgctctgcgaccagacgaatgaagtcgtcgtcgcctttccccttctcggcgatggaaggttctgcggcactctccttctctggctcattggcctcgcagagacggcgcagcagcgcgttttgccgcttttgctgatccagcagcgcctgcagcagcgctatctgctcattagcgcgcgagctggcgcgattaacaaaaaaccataacaacaggccgacaagcaacagcacaactgaaagcgccacggatgccaggcttacaatcccaggatttagtaactcactcatttcaccacctcaaagagaaggcgtttattctaccacccgcgcggcagaagaaaatcagtcatattaaaaatgtcttaccagggaataaatttattgatagtgcagatgccgctgaagaactgtacatcctgatcgcacattacgttaagcatctgagtccatagcagtaaacaacctgcgatgatgactatcagcaaaacccagcgtaattttttcactccacactccgcatcagtaccagatgtcgccaggataacatgaccttcttaaaccgcggctaactgtaatacgaaaggcaagtttaggaatcatagacttgtttcaaacgatgttcatgccagaatggacgcaaggataatacaaataatgaggcaacaatgcgattgatcattcgtaccattgtggtgctggctatcttgtggattggcgtattattaagcggctacggcgtattaatgggcagcagtgagaatgccggggggctgggattgcagtgtaaatatctcacggctcgcggcatcagtaccgcacaatatgttcattccagcagcggtattatcggcattaccgattgccctatcctgcgaaaaagcgccacggtagtcgataacggctagtcacgatcgggctacagacgctgtagcccgatttacgcacaaggtcagaacggataatcgttgtagcccatctgttctgaaattttacgcgccgccgtgtgcagcatcgccacgtactcgttcaggcgctcctccgagaaacgcagcgtcgggaaagagatactcaggcccgcgataaccacgccgaagcggtcgaaaaccggaaccccgatgcagcgcagcccctcttcctgctcttcgttatcttcgccatacccctgctcgcggaccttatcgagaaccgccagcagcgcttcggtgctggtgatagttctgtcggtgctgcgtttgtactccaccccttccagaatctgctcaacctcggcacgatcgcgccaggccagcagcactttaccgatcgcggtgctgtacagcgggttacgacgcccgatgcgcgaatacatgcgcaaattgtacattgagtcgattttgtggatgtaaacaatactgtcttcatccagggcgcccaggtggacggtctctttcgtcaggcgtgaaagctcgcgcatctgaatatcagcgctgcgcaccaaatcaacgttctgcaaagcccgcgcgccaagttcgaagagtttcagggtcagagaatatttctcggattcgccttcctgagctacgtatcccagcgatttcatggtctgcaaaaagcgataaacggtgctttttgacatcatgacgcgctgggacagttcggtaatgccaatttcacgctcttcgccaagcgcctgcagaatgccaaaaaccttcaataccgaagagacagaatctggctgtttatccaaatctgcaactgccatttatcacctcatcgcaactgttttataaaaattagaaccggtttttattataaattcgcatcccgttacccgcaatcgttcttctgccgattcgttacaaatctgcgacatgccgctgaataatcaatgctaaaattattaaccagttaatagttcccgataagatacagacttcacatggataaaaacatctccgatgggctgcctttaccgcagcgttacggcgccattctgaccattgtattaggcctggcgatggcggtgctggacggcgctatcgccaacgtcgccctgccgaccatcgccagcgatttaaacgcatccccggcctcttcaatctggatagtcaatgcctaccaaatcgctatcgttatcgcgctgctgccgctctctttcctcggcgatatggtcggctaccggcgtatttataaaatcggcctggtgctttttacctttacctcactggcctgcgcgctctccagaagcctggaaatgctgaccctggcgcgcgtggcgcaggggctcggcggcgcggcgctgatgagcgtgaacactgcgctgattcgcctgatttatcctcagcgctttctcggccgcgggatggggatcaactctttcgtggtggccgtctcctccgcggcggggccgaccatcgccgccgcgattctctcaatggcctcatggcaatggctgtttctgattaacgttccgctggggattatttcactgcttctcgcgatgcgctatctgccagctaacaccggccgcagcaaggttacccgcttcgacctgccgagcgccatcatgaatgccctcacttttggcttactgattaccgccctcggcgggttcgctcagggccagtcaggcgcgctggttgcggcggaggttatggccatgctggttgtcgggttcttttttgtccgccgccagctcaaaatgccggtccccctgctgccggttgacctgctgcgcattccgctattctctctgtcaatttgtacgtcgatatgctctttttgcgcccagatgctggcgatggtttcgctgccgttcttcctgcagtcaatgatggggcgtagcgaggtggaaaccggtctgctcctgacgccgtggccgctggccactatggtgatggcgccgctggcgggatatttgattgagaaagttcacgccgggctgctgggcgcgatgggtctaatcatcatggcctgcggcctgttcggcctggctttactgccctccgcgccgtcggacctggatattatctggcgaatggcgctctgcggcgcgggctttggtctgttccagtcccccaacaatcacaccatcgtctcgtcagcgccggctcatcgcagcggcggcgcaagcggcatgctggggaccgcgcgcctgcttggacagagcactggcgccgcgctggtggcgctgctgtttaacctgctgggcgatagcggaacccacaccgcccttttgctggccggaacgtttgccgtcgtcgcggccgccgtcagcgggctacgcgtcacgcagccgcgcgtcaggctgtaacgcaaaaccggcataaaaaaatccgcagcccgaaggttgcggatttttgttttcagggccagacgcgacggttatttcaggtattcgccgctgcgcagggcttcaatacgtttatccagcggcgggtgagtcataaacagctcgctcatggatttcgctttgccgttaatgcagaacgccatcatgctgctggcctcctgcggctcatagctggttttcagacgctgcagcgcggcgatcattttctcacgccctaccagcttcgctgaaccggcgtccgcatggaactcgcggtagcgggagaaccacatggtgatgatgctggccagaataccaaataccagctccagcaccgtggctaccgcaaagtagatcagcgggttgccgttgctgctttcaccttcatcgcggttgccgccgaggaagcccgccgcaatctgcgcgataacgcgcgagataaagataacgaaggtgttcactaccccctggatcagcgtcatggtgaccatatcaccgttggcgatgtggctaatctcatgggcgataaccgcttccgcttcatcacggctcatgttctgcagcagcccggtactgaccgccaccagcgacgcatcgcggcgcgcgccggtcgcgaaggcgttaatatccggcgcatggtagatagcgacctgcggcatagcgatacccgcctggcgcgcctgctgcgcgacggtattcatcagccagcgctcggtttcgttacgcggctgctcaatgacttccccacccaccgatttcagcgccatccatttcgacatcagcagcgaaacgattgagccgccgaaaccaaacaacagggccatgatcagcagcccggtcatgctgcttgactgaattcccgtcaggctcagcaccagcccgaacaccaccatcactgccaggttggtcagcaggaaaagcgcgattcgcatcataattttcttttaacctcgatttaacaaaacgcactatgcgattacccacatggtatgggtagaacgccaattttcaaccatcaggccctgctaagtcacgagaaagacacaactttacattttgtagcatattgctgacgctgggcaaaagcgttgacattttgttgaaatcaggcaatgaacgttgggaaaggcgagaaagaaaaacgggcacaacttagtgtgcccgttgggggattatttactggccggaggctctaccgcaggccgatccttttcctcatgggccaggtcgagcgcaatatgaaccgtttcatcaagatacgggtcaggctcctggtaatccttcggcagatcttccagttttttcagtagcggcttgccttcgcgtttcaggcgatcgttaacgcgggccagacgaatcgcatcatcttcttcattctccttttcacgctgcgcgtaattcagggagacgatgttacgtttgtctttcatcgcgttatagcgagcaatgtccttcatgatgtactggaactcaggatccttggcgatacgggcatcgtggcgcttcagcagctcgggtccgaacggcgtcaggtcaccatacttcacgaaagttgccgcattgacgctatcccacggcagcgcgttatcttcatactgctcgccggtttcacgctcttcggttccggtcggcatcatgatgtctggcgtcacacccttgcgctgagtactgccgccgttaatacggtagaatttctggatggtgtactgtacggaccccagcgccggccagtcagggcgcagcatctgatcgtaaatgcggttcagcgaacgatactgctggacggtccccttgccaaaggtcggctcaccgacgatcagcgctcggccatagtcctgcatcgcggcggcgaaaatttcagaagccgaggcgctgaaacggtcgaccagcaccaccagcgggcctttgtagtacaccacgccgtcggtatcgctgtcttcacgcaccttaccgttattatcgcgaacctggacaaccgggccggatggaataaacaggccagaaagcgaaaccgcttcggtcagcgccccgccgccgttgctgcgcagatcgataacgatgctgctaacgttctgtttctccagtttctgcagctgaaccttgacgtcgtccgtcaggccaacatagaaacccggaatatccagcacgccaaccttctctttgccgacggttttgactgacatcttaaccgcgcggtcttcaagacgaatgcgttcgcgcgtgagggtcacaatccgcgttttcgcgcctttacccgccgggagaatttccagacgaaccttgctgcccttgggacctttaatcagcgccacgacatcatcaagacgccagccgatgacatcaaccatgcctttacccggctgcccaacgccaacgatacggtcgcccacgctgatggatttactcttcgccgcaggaccaccggccaccagtgagttgatcaccgtgtagtcgtcatccatctgcagtaccgcgccgataccttcgagagacaggctcatttcggtgttgaactgttcggtattgcgcggagagagatagttcgtatgcgggtcgatttcacgcgcaaaggcggtcatcgccagcgagaaaacgtcttcactattggtttgcgccagacggcgaatggcaaacttgtagcgacgggttagggtctcgcgaatctctttatcatctttgccagccagcttgaggctgagctgatcaaacttcaccttggcatcccacagcgcattcagctcggcctcatctttcggccagggagacttgctgcggtcaaggttgaagttgtcattgccggtaaagtccatcggacgttccagcactttcaatgcatattgataacgctcaaatcgacgcttctgcgccaggttatacaggtcgtaaaaaacgtccagcttcccgctgcgcagctcatcgccgatttgattctttttcgcggcaaactgggccacgtcgctggctaacagcacgttatggctgtagtcgagcaggttcaggtagcgatcgaaaatttttgccgaaaaggcattatcaagatcgaactgccggtagtgagagcgggtaaagcgcgatgtgacgcgctcgctcaccgtcgcgtgctgcggctcttctttcagcacggggatttgatcgatccgggtgatatcgtccacggcgaatgactggcctgcgattaccagcaggcccgccaacgcggtgagcttaaagaatttgttcatgcctggcccggcctccgtttcagaacaccaggtgttctgcgcgtacaatcattgacataccagaagtcagctgtacacgaacgccatctttggtgatttccaggacggtggcgtccattgcattattgcctgctttcaccttcagtgcctggccaacggtcaatacagacacatctgatacaggggtatgacgctcttcgcgcggcgctttggctgctgctgccgggcgaggtttacgctgctcagcgccgtctttacgacgcgcctgaggctgaggacgtggtttacgctcgcgacgtgccccctcttccggctggcctgctgcggcagcggcttcgcgttttttggcctgctgcgcttcgcgctgcgcctggacgcgggcttttgcttcttcaagctgctgacgggcatgagcgacgtgctgctcttccagttcgccgcacgggttgccgtcaaggtcaacgcggactgcgccaggcttaacgccgtacaggtagcgccagctcgaagtataaagacgcaaagcagcgcgaagttgggttttgctgagattcatctctccgccaacgcgctcaacgagatcctgaaaaataccgactttcagggggcgagcttcgccttcagcgctaaaacactgagggaaacgttcggccagaaacgcaatgacttctttactgctattcaacttaggttgattttccatgaaatttcctgattacaacggacgtagccaacaagccgcaggcatgaacaggcgtcattataatgacgtcatcggtaaatgctacgttatccgttgattatcctgcgacgcgggtgaatattttttgataatcagtcgcagaaatgagtttttccagatgcgcgaccagttctgccagtccctgctcatcttcagcggtgaagcgggaatgcgccgtgctatcgatatccaggacgccgatagtttgattgttcacccgtaacgggaagacaatttccgaattactggcggcgtcacaggcgatgtgcccatcaaacgcgtgaacatcctctacccgctgcacgcgattctgcgcgacggcagtcccgcatacgccgcgtccgaccggaatccgcacgcaggccagcttgccctggaacgggccaagcaccagcgtgtcaccttccagaagatagaaaccggcccagttcacgtcggtcagccgctcgaacagcagcgcgctggtatttgaaatcatcgccagaaaactggtttcgcctgccattaacgcctgaaaatcgcggttcaaatccgcgtagaattctgatttgttcattatttggtcgcttagttgtcttactaccttacacttacagcctaataaaataagctttaaatgcattcatgctcaagatgaattcattcctgagttaagatagagagatacactcatttctgtaagctataaatgccactaaaaacacccaggattacgccagcaaaaaaaatgatcgtctactcggtcagcgcccccgttgagcacgctcactatcagcgctgtccgcagtgcgacctgctgtttcgtttaccggtccttaaaaagaatcaaagcgcctggtgtccccgctgcaacgccaaagtgcgcgatggccgcgactggtcgcttacccggctgggcagcatggcaatcgcgatgctgctgctgatgccttttgcctggagcgaaccgctgctgcgtttgcatctgctgggcgtgcgtatcgacgctaacgtccttcagggcatctggcaaatgaccggccagggcgatccgctcacggcggcgatggtgctattttgcgcggtcgtggcgccggtgctgctggtggtctcaatcgcctatctgtggctgggcaacgtgctgggcatgaatctgcgcccgatactgctgatgctggagcggctcaaagagtgggtgatgctggatatttacctggtcggcatcggcgtcgcctccattaaggtgcaggattacgccttcctgcagccgggcatcgggcttatcgcctatatctccctcaccctgctcagtatcctgacgcttatccatatgaacgtggaggagctctgggagcgtttttacccccagcgcccggcgctgcggccggatgaaaacctgcaggtttgcctcggctgccattataccggccatcgcgattcgcgcggccgctgccgtcgctgccacactcccctgcgccacagacgccgccagagcctgcaaaagagctgggctgcgctgattgcgtcaatggttttcctgctgcctgccaacctgctgccgatctcgattatctacgtcaacggcgcgcgtcaggatgacaccatcctttccggcattatgtcgctggccagcagcaacgtcgctatcgccggcgtcgtgttcatcgccagtattctggtcccattcaccaaagtaattgtattgtttacgctgctggtcagcatacaattcaagtgtgaacaggggttacgtacccgcatcctgctactgcggctgattacctggatcggccgctggtctatgttggatctttttgtcatcgcattaaccatgtcgctgatcaaccgcgatcagctcctcgcgtttacgatggggcccgccgcggtctattttggcgccgcggtaatattaactatccttgctgttgaatggctggacagccgcttactttgggacgcacatgagtcaggaaacgcccgcttcgccgactgaagccaaaattaaaactaaacgccgtatctcgccattttggctgctgccggtcatcgcgctgctgattgccggctggctgatatggaccagctaccaggatcgcggtacgacgatcgttatcgacttccagtccgctaacggtatcgtccctggccgcacgcctatccgctatcagggggtagaagtcggtacggtggagaacatctcgctgagtaaagatctgagcaaaattgaggtttccgccagcgtcaagggcgatatgaaagatgcgctgcgcaaggagacgcagttctggctggtaacgccgaaggcttctctcgccggcgtgtccggcctggatgcgctggtgggcggtaactatatcggcatgatgcccggccagggcgagcccgaggatcactttgtcgccctcgatacccagccgaagtaccacatcaacaacggcgagctgatgattcatctcaagtcagcggacttgggttcgttaaccagcggctcgctggtctatttccgcaaaattccggtcggccgggtatatgactacgccattaatccgaacaatcagggcgtcaccattgatgtgctgatcgagcggcgtttcaccaacctggtgaaaaaagagagccgtttctggaacgtatccggcgtgaaggcggacgtcagcctgagcggagcgaaagtccagctggacagcctctcggcgctggtgaacggcgctatcgcctttgattccccggatgattctccacaggctcagcaaaacacggattatcacttatacgaagacctggcgcacagccagcgcggcgtggtggttaaactggatctcccggatggcgcaggcttaaaagcgggctctacgccgctgatgtaccagggcctggaggtcggccagctcagtaagctgaatctcaatgccgacgggaaagtgaccggcgaaatgaccgtcgacccgagcgtcgtcagcctgctgcgcgagaagacgctgattcagatgaagaagccaaaaatctcgctggataaccccagcgtcagcgccctgctgaccggcaccaccttcgagctggtccccggcgagggtgaaccccgcaaccagtttgcggtgctgcctgccgataaatccattctggaagagccggatgtcgcgaccgtcacgctcaccgcgccggaaagctacggcatcgacgccgggcagccgctgattctgcacggcgtgcagattggccaggttctggagcgcaagctgaacgccgatggcgtcacgttccaggtggcggtgatgccggagtaccgttctctggtacgcggcgatagcaaattcgtggtcaacagccgcatcgacgttaaagtcggcatcgatggcgtggagttcctcggggccagcgccagcgaatgggtcagcggcgggatccgcattatcccgggcgacaaaggggcgatgcaaagccgctatccgctgtacgcgaaccaggaaaaggcgctggaaaacagcatgagcgatctgccgaccaccacgcttacgctctcagccgagacgctgccggacgtgcaggcaggctccgtggtgctgtaccgtaaatttgcggtcggggaaatcatcaccgtgcagccgcgcaagaacgcctttgagatcaatatccatatcaagccggaatatcgccatctgctgaccagcaacagcgtgttctgggccgagggcggcgcgaaagtgcagcttaacggtagcggcctgacggtgcaggcatccccgctctcccgcgcgctgaagggcgcgattagctttgataacctcagcggcgccagcgctagcgcgcggatcgataacaaacgcgtgctgtatgcgtcagaaaccgccgcccgcgcggtgggtgggcagataaccctgcacgccttcgacgccggtaaaatcgccgaagggatgccaattcgctacctggggattgatattggccagatccagtcgctgaatttaattaccgcgaaaaacgaagtgcaggcgaaagcggttctttacccggaatacgtcaatacctttgcccgcgccgggacgcgtttctcggtaattacgccgcagatatccgcggcgggcgtcgaacatctggatacccttttccaggcctatatcaacgtcgagccgggacgcggtgcgccgcgccgtgatttcgaaattcaggaaaccacgatcagcgattcacgttatatcgacggcctgagcattatcgtcgaagtaccggaagcgggttcgctgggtatcggcacgccggtgctgttccgcgggctcgaagtcggcacggtgaccggtctgatgctcggttcgatgtcggatcgcgtgatggtacagctgcgtatcagcaagcgttatcagtatctggtgcgcaacaactcggtgttctggctggcttccggctatagcctcgactttggcctgattggcggggtggtgaaaaccggtacctttaatcagttcattcgcggcggcatcgcgtttgcgacgcctccgggtacgccgctggcgccgaaagcgcaggatggcaaacacttcctgctgctggagagcgaaccgaaagagtggcgcgaatggggcaccgccctgccgcgctaagcataacaggctccggtgtccgccgccggagcctttatggtaaactacgcccccttttttcgttgtggtgcgctccccgtggctcaaaacgctgtctatcttcctgaagaattcctcgctcaaatgcgtgcggcaatgccgacgcatctctcttttgacgactttatcgccgcctgccagcgcccgctgcggcgaagcattcgcgtcaatacgctgaaaatcacggtggctgattttttgcagctggtcgccccctaccgctggcagctcacgccggttccgtggtgcgaagagggtttctggatcgagcgtgaagatgaagacgacctgccgctgggcagcacggccgagcaccttagcgggctgttttacattcaggaagccagctccatgctgccggtcgccgcgctgtttgccaacggacagatgccgaagcgggtgatggacgtcgccgccgcgccgggttctaaaaccacgcaaatcgccgcccgcatgggtaatgaaggcggcattctggccaatgaatattccgccagccgggttaaagtcctgcacgccaacatcagccgctgtggaatcagcaacgtggcgctgacccatttcgatggtcgggtattcggcgccgcgctgccggaatgctttgacgcgatcctgctcgacgccccctgctccggcgaaggggtagtacgtaaagatcccgatgcgctgaaaaactggtcgccggaaagcaacgcggaaattgcggtgacccagcgcgagctgattgacagcgcgtttcacgcccttcgccccggcgggacgctggtttactccacctgtaccctgaaccggcaagaaaacgaagaggtggtcaacgggctgctggcgcgctatccgcaggcggtagaagtcgtgccgctcggttcactgttcccgcaggccagcgaagccctcaccgaggagggcttcctgcacgtcttcccgcagatttttgactgcgaagggttcttcgtcgcccgtttacgtaaaaccgcggccatcgatccgcttccggcgccgggttataaagtggggaaattccccttcacgccgcttaaaacccgcgaatccgccgccgtgattgccgccgccgccgccgtcggtttgcagtggaccgccgaccatacgctctggcagcgcgataaagaaatctggttattcccacaggcgctcgaagcgttattcggcaaagtgcgcttttcccgcatcggcatccggctcgccgaaacccataacaaaggctaccgctggcagcacgaagcggtgattgcgcttgccgcgccggccgctcccctggcgctgacggaggccgaagcggaagagtggtatcgcggtcgcgatatctatcctgaaacgctcccgcagaaggatgatgcgattgtcacctatcagggcgcgccgatcgggctggcgaaaaaagtcgggtcgcgtttaaaaaatagctatccccgcgaactggtgcgtgacggtaagctttttagcaaaaaagcgtgatggcgcgtcgaaaaacagcattttttcactggcgctttacgcccgtttgtctacgctgaaaaatggcggccttaactggtcgtaccacaactcagcagacaaacggggtgaatttatggccaaaactaacgtacgtatcggcgcgtttgagatagacgacgccgaactgcacggcgaacagcagggagagcgaacgttaagcatcccctgcaaatccgatccggatttatgtatgcagcttgatgcatgggacgcggacaccagcgtacccgccatacttgatggtgaacattccgtcctctaccgtaagcactacgatcgccagtccgatgcctgggtcatgcgcctcgcctgactcaattgaacccgtcgcctgagacgggttatttatttccccgcttctccgtcatctcctacacttaacgctatgtttttcaggatatgaggctcggatgtttgccttagtgctgtttatttgttacctggacggcggctgtgaagatatcgttgtcgatgtttacgataacgagcggcagtgcacaacggccatggacgatcagcggatacgccacggcggctgctttccggtagaagattttatcgatagtttctggcttcccgcccgagaatacagcgatttttagcctgccagctgtagcgccaccagggttagctctccaccaaacacggcccccgtatcgatatagtgctggttatcgctgtcgtagcgtcgtttcagcggcgtatggccgaaccagaaatggtctgcgccggcaatcgcgccgtgacgcccggcgaggtggtcggtaagacgctgccgacgccacagcacctggtgctcatcgacagcgcgctgccagcgataaaccgcggcggggtaatcagcgtgggcaatcacgtgcacctgctcaccgctgtggagttcaataatcaacggcagtcggcggcagcgggcaataagcgccgtaaggcgttgcttttggctcgccgcacgctgcgtataccagtcgcctccgttcatctcccagagcctcatatcgccgtcggcaagcgcctccagcgccatctgttcatggtttccacgcaccgcgtaaacccagcgatagcgcagtaaatccagacactccgcgctttgtggcccacgatcgatcagatcgcccaccgaaagaagcagatcctggtaagggtcaaacttgcgctcacgaagggccgccatcaggcgtgcgaaacagccgtgcaggtcgcccaccagccagatattacgccagtcgcaaccgtaaatacgctgatacatatttcgtcctcctcgcataattataggaaaaccctgcggcttcaccgcccgtaaattggcacctcaatcgattttaaacgaaagccaaatatagtccggccgggcattaagctccccacgatatatccatagaatagaggctaaataacaccgaggtattcatcgtgacggataacagcctgcattcagccagcgtagttgagcgacgcccaaatctcattgccgatctggtgatgggccggatcacccccgcccccatctggcaacaacgtcattaccggcttaagtttttactgcgcacggcattattttatgcgccaacgcgcggcatgctggagagcctgtcagcgcgtgcggattttaatcagctgctcgccgctcaggtgacgctgccgggcaaagtccatcgccagtatttaacccgcgggttaaacgccagccagcgcgctcaggccattatcagccactatcagttcgttgattccctgggcgcctcgcgcctcgccggggccatgaccgcagcgaaagatgtgccgctgcttgagctgacaggcaaagacgacagccggtttacgctctccgcttcctcggcgggcaaagccgaacgcgagggcgaaacgacgctgtggctgcgcgatagcgatgagattgtgcttgccagcgcgacctttagcgtcacccgccagcaggagcaatggcagttgactatcggcggcctgcaggggccgcgcagcaccgttccgcacgaagtgattaaacgggcgacccgcgcctgttacggcctgttcccgaaacgcctgctgatggaatttatctggttaatggcggcgcgttgcaacattcatcacatttacggggtcagcgacagcggccacgtcttccgcgcgctgcgctatcggctgagtaaagggcgccattttcacgccagctataatgagttctggcactctatcgatggggtcgccgacggcgcctggcgctggcgcctgccgctgcagctggaaagaaagacgcttgagagcatcgccagtaagaaacgcgccgaatatcgtcgccgcttccagctgctggatgatatggccgctcagatggcgatactcatggattagctctcccgccgcttcgccaacgccgtttagcacaacggcgtttgcatcttcaacggcgctttagttactatcataacttcgttgtactccttgcggacggctagtgaagttatgagcaaaacagaattactcctgctggctatcctgttgattattttgaccgctgctctgtggtttatttttagcggacaaatatggtttctggtgagctttctggaaacatggctgtacccctcttttgtggcgccagaataaatcgttgcccattattttcacgccgccgttcgcccccttcgcctccctgacaataacccatagcgcggtcagaagaataaccgccaaaaaagtgaaaaaccgtctcttatctattatttcatttgtcatacaaatgtgtatactgggtcacttccgatgttggcccgtaaagttcacctgcactatgggcctgattttgtgcaggtgttttctcctcgcccttgctcaacggcgcctccagtgtctatacccgcctttttgtccagattttttgttgcaaactttgcgccagattgtgatttaagaaaaaatcgccctattttcacgccccttcaaaacacaattaaaaaacataacaccaacaattaattaacaaaaagagtttgcatccacataaaaggcataaacacagaacaacaatccaataaaaaacacataaccagccataaatacaaaattacacatatcttgcaggagtagttatacgttaaccaacaaaaccgcggcacttaatcggtgaccaacgtctatcgctacattgttgtttttcttcagcggctttccactaagaggttctctatgaacgtcacaacgatctcgcgcagtctcctgggcggcttactgagcgccatagtcattcttcaaccggcttctgcagcgggaaccttaagcggccagattggcgtccaggtgacgctcggcagcggatgcagcgtatcgaatgtccgcaatggcgaaaacaaccgctggggcaacattaatttcggctcctatggcgatttagccaactccattgatgcggagatcaccggcagcggcggcggaaacgccctaaccgtgacctgcaccgaggatcttgcctcgaccctgacgcttgacggcggccagtctggcgatgctgcgctgcgctatatgaaaaacgccggtggcacccagcagattgcctatcggctctattcggatgccgcccgcaataacgaaatcctgcctggcggcacgatacctatcattggcacagggaatccacaggcgattcctgtttttgcccgcattcgccccgaagaccagagcgtcaacgcgccgacagccgatgtgtatgacgacattgtcaccgcgaccttagcctggtaaccgcataaggaaaatgggcttcatgcttcgaccagagtggcttacattacttctgctttttacctcgggcgcccatgccgccgttgcccaaaagacgttcaaagtctccgcgcagataaccgcaggctgcgcgctgggcgccggggacggctcccaaacgacggacttcggcacgctgaattttggcaccctgtcatcgctttacagcaacgtggatgtcgcgagtaccgccggcgcaggttccatcatcgtgacctgcacgcccggcaccgctatttcaatcgccctcgactatggcgtcaacggcggctcagccactcagcgctacatgtcgaacggcaacagcagcacgctggcgtaccagctttatcaggacgccaaccgcgctaacgtttggggcagcagtacgctggccctgagcgtcgcatcctttccgagcaccacgcaaacctacacggtttatggccgcctttttgccacgaatggcttcccggcggtgggctcctataccgacacggtcaccgtcacgctgacctattagataattcacaggttaactatgattcgctgtagatttgcgccgtttatattcgctttattgcttccctcatccgtgctggccgccagctccgttctggtatggccgatatttcaaacgatcgaaagccacgaaacagggtctgaactgtggctggagaatcgcggcagcgcgccggttaatttgcagctgcgcgtgtttgcctgggatcaaaaagcgtcagcggacgtctacgccgatcagcgggatgttgtcgccagcccgccttttaccacggtagcgccggggcagcgccagctggtgcggctcatgcgcgtcgcccccatcgcaaacggcaaagagcactcctatcgcattgttatcgatgagatccctgccgcgcaacccgcggcgcagacggaacagaacgccgccgggctgaaaatgcgcatgcgctatgtcctgccgctgtttacctatgggcagggcgttacgccgctaaagaacgcgggttcagtcgaaccggtaagggccacgctgcgctggtcgctctcgcagcaaaataaccgccagacgctgtgcatcgaaaacagaggcaatcagcacgcgcgcctcagcgcggtttactgggcgaacgcgaacggtaaggggcgcattccccaggctaatggtcttctcggctacgttctggcgcagaaaaagagctgtttcccgagcgccggaaacgcttccgtgccgtcaggaatgcatctgttcgcgaaattaacggataacggtcaggcggtggaaattccggcgaatcgttaaaaatgagagatctgaaaaggacggcgtccggggggctgctggcgatggcgtcggtaacggcctgcgccgcgacctatgattccctgcctgcgcctgcggcatcctacggcgaaaagcaggagtacgagctgtacctcagcgtatcggtcaacggcaatattcttgccggcgccgttccggtaaaggtcaacgctggccactactggatcgcggccagcgtgttgcagcaagcgcatattcccctgcaaaccggcgacgcgctggttgatgtgacgacgctcccctcggtgaaagtggaatatgaccagccgggtcagatcctcaagctccaggttccggacaaatggctccccgagcagcacatcggggggaccacggaacaacctggccagaccgcgataagcagcccgggaattttatttaactacgacgcttacagcctcttttcatccggcggttcgcaaaccaccagcaccttcaccgaaacgcgccttttcggcccgccgggcgtcctttccaataacgccgtgattcggcaaaactggtcttcgacgggctacgagcagcagggctatatgcgctacgacaccctgtggaagtacagcgatagcgaccaaatgattagctaccaggccggggacgtggtcagtaacgccctgacgtggagcagttccgtgcgcatgggggggctacgcctgagccgcaacttcagcgttcgcccggatctggtgacatatccgctgcttaacttatccggcagcgcggcggttccttcgagcgtcgatctgtttatcaacggctataagagcagctctgcgcaaatcaatggcggcccctatacgctgaccaacgttccctggatcagcggcgccggcgaagccaccgtagtgaccaccgacgctctgggtcgccaggtctccaccagcatccctttttatgtctccaataccctgctgcgggaaggactgagcgattttgatttcaccctcggcgccctgcgcaacaactacggtatcaggagtgccgattatggcgccggcgcggtaagcgctatttatcgctacggattcaacaactggctcacgctttctacgcataccgaagaccgcgaagggttaaccaatgccggcattggcagcgatatcggcgtggggaatctgggcaccctcagcctgtcgggcagcgccagccgtggcgagggagacggaaaccagttcacctcgggttactcttactatggcagtagctggggagtgagctatcaacatatccgccgcagcgccagctacgacaacctcagcacctatgggtctaccgccacgctcagccgtcagtcagaccaggccacgctgagcctgagtccgtggggacgaaccctcggttcttttagcattggctactttgatatcaaagccgaggataattcgcgcacccggctgctgaacctctcctggagccgcggcctgtggctcagcagcagcctcagcctgagcgtcaaccgcgatctgcaggaaggtagctacgccagcatgctgcaggtcatcatccctttcgattcgcaaacctccgtccagctaagcggccagcgcgccagcgccggacaatggggagaaaatatcagcgtcagccgctctgctccggcagaaggcgggctgggctggaacctcgcccattcgatcggcggcgataactatagtcaggcggatctgacctggatcaaccgcgtgtcaacgctgagcggaggctactacgggtcgcgcgacgatcgtcacagctggtttgaggccgcgggctcggtggtgctgatggataacagtctgtttttcgcccggcaaattaacgacgcctttatcgtcgtctccaccggcaactacccgaatattgcggtgaattatgaaaatcgcaaagtcggcgtgaccgataaaaatggtcatctgctgatcccgtgggcgacggcgtggtatccggggaaagtcaccctcgatacgctaccgctgccaacggacaccgaagctctgacggtggagaaacgcatcgccgtgcgcgaaggcagcggagcgctggtcgatttcccggtgaaccgcgtgcgctcggcaaccctcgtcttcgtcgatgccagggggcaaccgctgccggtcggtacgccggtcgaggaggttaacagcaagcagcgcggcctggtgggctatgacggcgtggtctggttctcgcaccttggacgccacaacgaagtcaaaataaacgccggagagcttcgttgcagcattcagttcgaacttccgtcctcaacgccggttccgcagcggataggtccggtcagctgcccctcttaacagcggagataacgttgaaaagtattatcctcgtattcgcgatgctcttagcgctcgggcaagccagcaccgcgctggccgcctgcagcatcaaaaccagtgcgccagcgatcggcccggtggattcctttgcgctcaacagcgcgcctcagggcgtgatggccggcgcggggttttactgcaccccggaactggtggcgctcaactcaaccaatacgttaagcgccactctggcgtcggccaacaagagcaacggcgttccgcggctgcttaatggcgcgggcgatgccatcccttatagcgtctgttctgacgcctcgtgctcgccggcctatcaggacggcggcgtgattagctggtccagaacaacgctgctcgaactgctgggtttatttaactcaggcgatggcaccatgccgctctacttcagaaccacgccgggagccaacgtccccgccggtacctataccgatgtgttaaccatcacctgggtgtaccgattctgctacgtcgggctcgatctgctgggcattaagatatgtattccgaataacggaaccctgacctctacggtcaacgtgtcggtgaaggtgaccaatgtttgctatatcgacagcgcgccggacgtcgaatttgcctctgccgctcttccgtccggttttagccactacagcggccagcttgccatccgctgcactaaaaacgcggcctacaccgtcaacctcgccagcactaacgccagcgtcggcgactggcggcagatgagccagcccattgcgaaccaaccaaccgcctggctgcagtatcagttttaccagcccaacggcagcgcctggacggaaagcaacaatctcagcgtaaccggctccggcgccgcgcagtccgcgaactacaccctcaagattaacccgacccagagcaaccagcctgcgggaacctacagcgataccgtactggtgaccgtgagctactaaaacgttagcagacgattttttgtaaaagaaatgtttaggaaattattgttgtggtataagaaaaaagccccgaaaaaagcgactggggttttgcaatggaatctgcggtttgtgaaaaacagataaaaagagaccgaacacgattcctgtattcggtccagggaaatggctcttgggagagagccgtgcgctaaaagttggcattaatgcaggctaagtcgccttgccttataagaatagtttaccgtgtcaggttttccagtccgcgacaaaagtggacgaataattcgtatcaaaattgctgatgccaacaaaaaaccgccacgcccggtatcgggggatggcggtttttttcatgtaaatacagcgggatgcaggcggcgatcagcagagcttctgcgcgcgctcaataaagggcgccaggctcattttttgtcccggctgctgcggatcgtcaatctggatcacagaaatcggctgcgcgttggttttaccgtctttcatctgctgttcggcgatgtcgtttagcgggtactgcaccagggtactgggattaatggcgaacagcgcgttgcccggacggcaggtcagcatcacctcttcacggttaaacgcccagctctccttacccacctcaaagcggcttacggtaatcacctgcggtgccgccagcgcagcgccagaacttgccagtaacaacattgtcagaacgatttttttcatgatttaaccagtttattcagaaaggttcccaggtggcaaacaggctgacggcaaacagcgccagcgcccccagcgcaatttctatctgcgtagtgcgcacgatgagctgctccgctcgcgttccgcctgccgacatgcgtggcaccagaacataccggttcaccagcgcaattgccaccattgccgccaccagcgcacatttgaacaacagcatacgcccccagggcgaggcgctgataagtccgccctggatcagcagcgcatttaccacgccgctggcgatggcgccggcaaccgccagatgcccgtagcgcgaaaaacgcatcatggtgcagatggccgcctgccgccagcgaccgtgcgccaggcgaagacagtagataaacggcagcagaccgccaaaccagctggccacgcaaaacagatgaagcgcatggttggttcgctgcactatccccagccagccatcgttcattgcggcatgcccgacgccggccagcagcaacagctgagcgcaaaacagcaccagcagcaaacgtcccggtcgccggggcttcagccagaccaccgccagcgccacaaaggcgagtaaaatttgccatacccacacgccgccaaactgcgtcccggccaccgcctgccagatagccggctgccagacgtccggccagccgttgcccatcaagccgccctgcgccatcagcatcagcagcgccgacagcgcgcttgctgataataaatagcgcatcagcggatagaagcgctgcatcatcaaacgacgtagggccaccggcgcccaccatgcgccgtagaggacgcagccgaaagcgacgatcagcgaaatgaaatggataaagcgtaagctgacatagactccactcagcattggcttacttcacggtaaaggtgtattgccctttcgtcttgtggccatctacggagaccacgtgccagttaacggtatattcgcccggcgtcaacgcctgctcaaccggtaccgtcagctgagccttattgctgtcgctgcggacgggtttaccgagggtgatggtcttctgctgcggcccggtgagggttacgccgctaaactgcgtttcgatgccttcggagaagttcagcgtcagcgcctgcggtgaagcgttcaccacggtattggccgccggaagctgttgttgtagatgggcgtgggccgatgcgcctgctgcggtcaggcaaccggcgagaaacagagacagacgcagcgcgcgcccggcgatgattggcatagttgtcattcctttttgttatgtatgtagcacagagaataaccctgtataatggcgcagtcgagctaagcgtctgagacttgcctttttgccgcgtgcttagtactttttgcggcgttatcagaggagaaaccgatggaaaagaacctggctaaactatcccaggaggagatggacaaagtgaatgtcgatctcgccgcggcgggcgtcgcgtttaaagaacgctacaatatgccggtggtggctgatttagtcgaaagagaacagcccgagcatctgcgcggctggtttcgcgaacgtctgatcgcccatcgactggcctccgtttcgctctctcgcctgccctatgaaccgaaacagaaataattcccgtcccctgcggacatccacgttggcaagacccgcgcattctattacgctggtttctttggcctggagcgagccatgctgcgcgtaatcgatacagaaacctgcggattgcagggaggcattgttgaaatcgcctcggtagatattgtcgacggacacatcaccaatcccatgagccacctggttcgccccgaccggcctatcagcccgcaggcgatggcgattcaccatatcaccgaagagatggtcgccgataagccgtggatcgaggagattgtgccgctgtatatgggcagtccatggtatgtcgcccataacgccagctttgaccgccgggtgttgccggaaatgcagggcgagtggatctgcacgatgaagctggcgcgccgcctgtggccaggcatcaagtacagcaatatggggctgtataaatcgcgcaagctcagcgtcgcgacgccaccgggactgcatcatcaccgggcgctgtacgattgctatatcaccgcggccctgctgctcgatatcatcaacacctccggctggacgcctgaggagatggcgaccattaccggccgcccggcgctgctctccacctttaccttcggcaaataccgcggcaagccggtctcggaagtggcggaaaacgatcctggctatttacgctggctttttaataacctggatcgcatgagccccgagctgcgcctgacgctgaagcactatctcggggagtaatcggcgctatacctccgcctggcccggcagcgtcccctgcgccaggccaatcagaaacgcatactccagcgccacgccttcatagcttttgaagcggccggatttaccgccgtggccggaatccatatcggtacacagcagcagcaggttatcgtcggttttcagctcgcgcagttttgccacccattttgccggctcccagtattgtacctgcgaatcatgcaggcccgtggtgaccagcaaatgcggatacgcctgagcctgcacgccgtcgtacgggctgtagcttttcatatagcggtaataggcttcatcctgcggattcccccactcttcaaactcgccggtggtcagcggaatcgactcatcgagcatggtggtgaggacatcgacaaagggaacctgggccaccacgccgtggaagagctccggccgctggttcaccgcgacgcccatcagcataccgccggcgctgccgcccatgccgtagcaaaaacgcggatcgccgtagccctgcgccagcagcgcatcgcagacgtcgagataatcgttgaaggtatttttcttgcacaaaaactttccgtcttcgtaccactgctgtcccagctcgccgccgccgcgaatatgggcgatagcgaacacaaagccgcggtcgagcaggctcaggcggctggcgctgaaatccgcatccatgcttgcgccataggagccgtagccgtacaccagcagagggctggcacctttgcggaaatgttcgtgacggtagaccagcgagaccgggacttcgacgccgtcgcgggcgttgatccacagatgctcgctgcggtagtggctggcatcgaaccctttgacttcctgctgtttcagcacccgccgctcgccggtattcatatccagctcaaacagcgtatccggcgtcgtcatagaggagtagccgtagcgcaggcgggcggtttccggctccggattataggcaagccaggtcacataggccggatcgtcaaaggcaatgccctgggactctcttgtcttacgattgatctgacgcaggctggtcagcccgcgctggcgctcttccacaaccagccagtcggtaaacagggtaaatccttccagcatgacttcgtgccgcggcgcgatcagggtctcccactgctgctcatcgcgcagggtagtgcgataaaggccgaagttcttaccctcacggttagagcgcagatagaaagcgtgctgatagtgatcgaggctatattcatgatctttacgccgcggtagaaaacagaccggctcggcgtcggtcatttccgcattgagcagcagcacttcgctggtggtcgcgctggccagatagatcaccacaaactgctgggaagtcgttttgtgcacgctgacgtaaaaagtatcgtcctgctcttcatacaccagaacatccgcactggccggcgtccccagacggtggcgccagacctgatacggcagcagcgtggtgggatgtttgcgcacgtaccacagggtctgcgaatcgttactccaggcaaaagcaggcgagacgttctccagcacttccgcaaattgccggtcgtcgtttaagggaaagaagcgcaggctatactggcgtcgggagagatagtcttccgccaccgccatcaggctgttgtcgggcgaaacgcctaatccgccgagggtatagaattcgctgccggccgcacgctggttgccgtcaagcaggacgtcccattcatcccactcctctttgactaccggctggcgttgataaatcgcgtactcgcagcccggctcgtagacctgacggtagcgatagccatttttgctgtagggggctgacacttcgcgctgcggaatacggtcgataatctccttgagtaccctgtcctgcaggctactttgcgaagacatcacttttttgccgtactcattttcctggcgcagataatccagcacttccgcctgcgagcgatcgtcatcgcgcagccagtagtaattatcgattcgcgtgtcgccatgtaatgtcatggcatgggggatccgtttcgcttttggtggcatctgcttattcttctgcggcttgtattgagtactaaaattttcaggctgcttcaaagcagcctgaagggtgacgtgactacacaatatataagggtggcaaaagtcgccagcgatgcaagcgaaacgtgcggatttagagcgttacggcctgtttttgcgcctgaatatcccgttcgatatcttcacgcacttcctgcgggagcttcagcgcttcgccgagggcgttcagatagctgcgttccataaagtggtcaatatcaatgaccgcgcagctgatatagtaaacttcaagcgcctcttgctcgctgctgatgccctgcgccaggctctgcgggtcgaggggctgcgccagcgcccggtcaattaacacccgggcctggacgtcgacgtttgccgcacgcagctgctcttcgatatttgcccgctcgcgttcgtcaatatgtccatcgcttttggcggcgaagaccagcgccataatcagccgttcgctgcgggcgtcgagttcggccggtgcgggagatggcgcctgtgcgggcgcgacatcagccgatgcctgctgcgcgctggcgcgcatcttctgctgatatttattccataaaacgctgcccgcaaccgcgccgccgccgaccagcagcgcaccggtgccgtatttggctaacagcttgcgcgatgatttgctggcgaccagcagcccggccagcccgccgagcgcgcccggcaggagtaaatttttgccgcttgattgatcgtcagatgaagaagaccgcccctgctgacccagcagagactgcagttgattaagccagttagccatacatttcctcgttgcgcgataagcgataccaccagcctaaacgacgcgacgtcaggaaacgttatcggcagctaaagatgagcaaatgtcgcgccgggaagcgcgggagcctgccgccagaaccgctggcggcggcagcgtagctcaggccgctttcgctttgcgcggcttcgccggcgccggggcttcagattcgacgacgtcgtcggtcttgtcgccctcttctgcttctgcgcgatcggctggcgcctcggcggccacctcggcttccggcagcttaccggagcgcaaaatatggtttagggtgtctttacgttcggccagccacatcgccatgctatcgcgctgctcttcatcgagcgttagcgggcattcaaccagccagtcgttcagtacttccgccagatcgagcattttgtcataagcatcggcctcttttttgctggcaaaagacattttttcctcaccttcgcgaatcactacatatttaatttcaaccgccatgatgcagcctctcagtactgtatttttatacagtatatcaaatttcttccccgaactcaaatgacgcgcataaagacatgcgcaaacgttttcgtttataatgcggcgcatgtttttttactgcggaagagagttatgactgtattaggtacggcgctgcgccctgcggcaacaaaggtaatgctgttaggttccggcgaactgggtaaagaagtggccattgaatgccagcgcctgggaattgagaccatcgccgtcgatcgttaccctgacgctccggccatgcaggtcgcacaccgttcgcacgtcatcaatatgctgcacggcgaaaagttgcaggcgctgattgagcaggaaaagcctgactttatcgtgccggaaatcgaggccatcgccaccgatacactggtcgcgctggagcaggccgggcagaaagtcgtccccaccgcgcgcgcggcaaagctcaccatgaatcgcgaagggatccgccgcctggccgctgaagagctgaagctaccgacctccgcctaccgttttgccgacagcgaacccgccttccgcgaagccgtcgccgggataggcctgccgtgcatcgtcaagccggtaatgagctcatcgggtaaaggccagagctttattcgttccagcgaacagctggctgacgcctggcagtatgcgcagcagggcggccgcgccggagccggacgcgttatcgttgaaggcgtggtgaattttgatttcgagattacccttctcaccgtcagcgccgcggatggcgtacacttctgcgcgccggtcggtcatcgccaggaagatggcgactatcgtgaatcctggcagccgcagcagatgagcgcgctggcgctggaacgcgcgcaggaaatcgcccgtcaagtggtgctggcgctgggcggctacggcctgttcggcgtcgaactgttcgtctgcggtgatgaggtgatttttagcgaagtctcgccgcgcccgcacgacaccggtatggtcacgctgatttcacaggacttatccgagttcgccctgcacgttcgcgccttcctcggcctgccgattggcacgattcgccagtacggcccggcggcctcggcggtgatcctgccgcagctaaccagccagaacgtcactttcagcaatattcaggccgcggtcggcgcggggctgcagctgcgtctgttcggcaagccggaaattgacggttcgcgtcgtctgggcgtgacgctggcgatagccgataacgttgaggaagcggttgcgcgcgccaaagcggcggcggcggcggtcgtggtcgcaggataaaaaaaagcccggtcgcagaccgggcctctggtgagtgcgcgaagattacttcgcgccttctaccgcctcacgagccagtttggtgatacggtcgtaatcaccggcttccagcgcatccgccggcaccagccaggagccgccgatgcacagtacgctgttcagcgccagatagtcgcgatagttcgccggagagatgccgccagtcgggcagaagcgaatgtgcgcgaacgggccgccaatcgcctgcagcgctttcacgccgccgtttgcttccgccgggaagaatttgaactctttcaggccatactgcatacccagcatcagctcggatacggtgctgatccccgggatcagcggaatagtgccttcgccggtcgccgctttcagcagggattcggtcaggccagggctgatagcaaactgcgcgcccgcttcggtcacttctttcagctgctcaacgttagtgacggtaccggcaccgacaatcgcttccgggacttctttggcgatcgcgcggatagcgtccatcgcgcactcggtacgcagggtcacttccagtacgcgtacgccgcctgcaaccagcgctttcgccattggcacagcgtgttctagctttttcaccacgattaccggtactaccggaccggaggtgaggattgcttctgcagttgttttccagtttttcatcagattttctctcgccagatctataaatcgaatcgtcttaaaaattgatgcaggttgcgccctgttctgctccggagagtttctcacgcagcgcaccgaacatttcccggccggttcccacgcgcgaaccgctcaggtcaggaatatgcgcctgacgcgcggccagctctgcgtcatcgaccagcagcgttagctcgcccgtctggccgttgacgcggatgatatcgccatcgcgtaccttcgccagcaggcccccatcgtacgcttcgggcgtcacgtggatcgccgatggcactttgcctgatgcgccggagagacgaccatcggttaccagcgcaattttgaaacggcggtccaataatacaccaagtggcggcataagtttatgtaattctggcatgccgttcgcttttggcccctgatgacggacgacaaccacgcaatctttgtcgagcagccccgcttcaaaggcgggcagtacgtcatgctggctctcgaaaaccaccgcaggagcttcaataatctggttttcaaccggcacggcggaggttttcatgaccgcgcgtccgaggttaccgctcagcactttggtgccgccgtggcgagagaacggtttgtcaaacgtggcgataacctgttcgtccagcggcgcggtcgccccttcgcgccagtcaagttcgccgttattaagccagggctccatggtgtagcgagagaggccgaagccggccacggtgtgaacatcttcatgcagcaggccgcctttcatcagctcgcgcaccagcaccggcacgccgccagccgcctggaagtggttaatatccgccgggccgttcgggtagaggcgcgccagcagcggcaccacgtcagagagatcggagaaatcatcccagttaatgataatccctgccgcccgcgccatagccaccaggtgcatggtgtggttggtagagccgccggttgccagcagcgcgacaatcccgttgaccaccactttttcatcaaacattttgcccagcggcatccactcgttaccgttgccggtcaggcgggtcacctggcgggcggcggcggcggtcagcgcttcgcgcagcggcgcatccggatgcacgaatgacgatccgggcagctgcatccccataaactcaaccaccatctggttggtattggcggtaccgtagaaggtacaggtgccaggcgcatggtaagacgcggcttcggactccagcagcgccatacgatccactttgccttccgcatagagctgacgaatgcgtactttttctttattcgccaggccgctggccatcggcccggaaggaataaagatggacggcaggtggccgaacgacagcgcagccatcgccaggccggggacaattttatcgcagacgccgaggtagagcgcgccgtcaaacatgttgtgcgacaggccaatcgcggcggacatggcaatcacttcgcggctgagcagcgacagctccatcccgtcctgcccctgcgtcacgccatcgcacatcgccggaacgccgccggcgacctggcctaccgcgttcgcagagtgcagcgctttgcggataatttccggatagcgctcatagggctggtgggcggacagcatatcgttgtaggaggtaatgatggcgatgttattgcgcagcatgcttttcagcgaggctttgtcatccgcctggcaggcggcaaagccgtgggccaggttaccgcatgccagctgggcgcgatgaacggtgtcggttttggcctggttaatccgggcgaggtaggcttcgcgggtatcgcgcgagcgttcgatgatgcgatttgttacccgtaacatttcagaattcataaaggctcctcaaatttcatctgtccggccgcagcgctttagcggtacttttaggggtttagggcaccagtactggggctcaggggcaaaatatctgcaggcagtgtaataaaaaaagccccgggggtgaatcctccggggcttaaaagattaaaaattacgcgacttgctgcgtcagatcatgttaccggtaaaataaccctgacggaggagctggcgattactcaaactcgttccacgaacgaccatcgcgggtgatcatcgccacggaggcaaccggcccccaggtacccgcctgatacggtttcggcgaatcgcgatcggcagcccaggcttcagtgatggagtcgacccacttccacgcctcttccacttcatcacgacggacgaacagcgcctggataccgcgcatcgtttccagcagcaggcgctcgtaggcatccgccaggtgggtttgattaaaggtttccgagtagctcagatccagcttggtgatctgcaggttatgcttgtggtcaagtccgggaactttgttcagcacctggatatccaccccttcatccggctgcagacgaatggtcagcttattctgcggcagctcttgccaggtctctttgaacaggttcagctccggcgttttgaagtaaaccacgacttcggaacacttggtcggcagacgtttaccggtacgcaggtagaacggtacgcccgcccagcgccagttgtcgatatccacgcggatcgccacgaaggtttctgtatggctggacttgttggccccctcttcctcgaggtagcccggcacttttttgccctgggcaaaaccggcggtgtactggccgcgcaccgttttttcacgcacgttggtgcggtcaatgcggcgcagcgatttcagcaccttcactttttcatcgcggatgctatcggcagtcaaatctgacggcggggacatggcaatcatgcacagaatttgcagcaggtggttctggatcatgtcgcgcatctgcccggcctgatcgaagtagccccagcggccctcaatgcccacctcttccgccacggtgatctcgacgtgatcgatggtgcggctgtcccagttattgacgaacagcgagttggcaaagcgcagcgccagcaggttcagcaccgtctctttacccagatagtggtcgatacggtagacctggcactcttcaaagaactcacccacccgatcgttgatctcgcgggaggtttccagggaggtacccagcggtttctccatcaccacgcgggccggcttggcgttcagcttcgcttcacccagacctttgcaaatcgcgccaaaggtgctcggcggcatggcgaaatagttaatggtcacccgctctttttgatcgagcattttgcccagacgagtaaacgctttggtatcgttgacatcaaggttacaaaaatccagacgcccgctcagggtctcccacaaaccttcatcgattttctccttcatgaaggtttccatcgcttcacgcactaccttggtgtaagcgtctttgtcccagtcggcgcgaccgacgccgatgatgcgggtgtcagggtggatctggcccgctttttcaagctgatacagggaaggcagcaatttacgtcgcgccaggtcacccttcgcgccgaaaatgaccagatcgcatgcctgggccgtttgcgttaccgccatgtcattctccttagttgatagcccggtgcttatgccagactatagttgtatttgtaattttctttcactgcatcgtactgtgtttacgaatttcccgaaaccctcagcggccgttcccgctgctaaatcgcacagggtggaaaacagaggctgagattttgggcatgcggctaatattgttcgttgtttcgaccgattatcagttagtaaaatacgactctgatcatgtaatgaaaaaaaacaacatattttcaggtcattcctcaccgtttccgactacggaggggtatattcttgctataacgcctgatgatttcacccattaatgaaatcgcttccattgatgagcgcccgattacccatgaatatgctggaaaaaatccagtcccggctggaacaccttagcaaatctgaacgcaaagtggcggaagtcatccttgctacccccgcgcaggccattcattcaagtattgccgccctggcgctggaagccggcgtcagcgagcccacggttaaccgtttctgccgcagcctggaaacgcgcggtttcccggatttcaaactgcatcttgcacaaagcctggcgcacggtacgctctatgttaaccgcaacgtcgatgaagacgacagcgttgagtcctatacgggaaagatatttgagtcagccatggccagtttagatcaggtccatcattctctcgacatgtcggcgatcaatcgcgcggttgacctgctcacgcaggcgaagaaaatcgccttttttggcctgggctcttcggccgccgtcgcccacgacgcgatgaacaagtttttccgttttaacgtgccggtgatctattccgacgacatcgtcctgcaacgcatgagctgtatgaactgtaatgacgatgatgtggtggtgatcatctcgcataccggcaggactaaaagcctggtggagctggcgcagctggcccgcgaaaacgatgcgatggtgatcgcgattacctcccccggcacgccgctttcccgggaatcaacgctggcgattaccctggacgtaccggaagataccgatatctatatgccgatggtctcccgcttagcgcagctgacggtaattgatgtcctggcgaccggcttcaccctgcggcggggagcaaaattcagagataacttgaagagggtcaaggaagcgctcaaggaatcgcgctttgataaagagctcagcgtacacagcaatgaccaataaaagtagaaacaaagcactatcctattacaccgtcggtaatgttccggtatagcgactttgctcgtcggcgctaccgaatccatgttcacgcaacaccaaagttgtttcagtcaacggagtattacatgtccagaaggcttcgcagaaccaaaatcgtgactaccttaggcccggctaccgaccgcgataacaaccttgagaaggttattgccgcaggcgctaacgtggtacgtatgaacttctctcacggcaccgcggaggatcatcagatccgcgcggataaagtccgtgagattgcggcgaaactgggccgtcatgtcgcgattctcggtgacctacaggggccgaaaatccgcgtttccaccttcaaagaaggcaaaattttcctcaatatcggcgataaattcctcctcgacgcaaacctgggtaaaggcgaaggcgacaaagagaaagtcggcatcgactataaagggctgccggctgacgtggttccgggcgacattctgctgctggacgacggccgcgtacagctgaaggtcctggaagttcagggcatgaaggtgttcaccgaagtcaccgtcggcggaccgttgtccaataataaggggattaacaagctgggcggcggcctctctgccgaagcgctgacggagaaagacaaagcggacatcatcaccgccgccaaaattggcgtcgattacctggccgtctccttcccgcgctgcggcgaagacctgaactacgctcgtcgcctggcgcgcgatgccggctgcgatgccaaaatcgtcgccaaagtcgagcgcgcggaagcggtatgcgatcaggacgcgatggatgacgtgatcctcgcctccgacgttgtcatggtggcccgcggcgacctcggcgtggaaatcggcgatccggagctggtcggcatccagaaggcgctgatccgccgcgcccgtcagctgaaccgctcggtcattaccgcgacgcagatgatggagtcgatgatcaccaacccgatgccaacccgcgccgaagtcatggacgtggcgaacgccgtgctggacggcaccgacgccgtgatgctgtcggcagaaaccgccgcgggccagtatccgtctgagaccgttgccgcgatggcgcgcgtctgcctcggcgcggaaaaaatccccagcctcaacgtctccaagcaccgcctggacattcagttcgataacgtggaagaagccattgcgatgtccgccatgtacgcggcgaaccacctcaagggcgtcaccgctatcattactatgacggaatccggtcggaccgcgctgatgacttcccgcatcagctccggcctgccgattttcgcgctgtctcgccacgagcgcacgctgaacctgaccgcgctgtatcgcggcgtgaccccggtgcatttcgatagcgtcaatgacggcgtagccgctgcgcacgacgcggtaacgctgctgcgtgataaaggctatctggtgaccggcgacctggttatcgtcactcagggtgacgtgatgagcaccatcggtagcaccaacaccacccgcattctgaccgtcgagtaagcctctccacctacctgccagcgccgcagctggcaggtatttttttgcctcctcgcccgctaaactacgcaagccagctcaacaatagcgtggcggtaatcaccgtcgacgcgccgccgatacgggtggctatctgggcaaaaggcattaatcccattcggtttgatgccgagagaatggcaacgtctcccgtcccccccagcccgctgtggcagctggtgacgatggccgcttcgaccgggtacatattcagccgagaagcgataagaaagccgcttagcgccatcgcaatgacgattgagccgcaaaccaccacgtagccaaccgagaagaccgcgaccacgctttccagaggaacatacagcattcccaggcctatcatcagcggccaaaccagcgcggcggagacgaacttgtagcagctgtgcgcccccagctccatcgccgccgggataaccttcgcgtatttgcaaaataccgcggccagaatcatcagcaccggccccggaatatgcaccaccttttccagcagaccgccgacgataaaaaacgcgcaaatcattaataatccggcccccatcagttggaaatccgtgggctgcgcgcgctgattttgcgcaaagacgctgttatcttcatggctgcggatcagcattccgctgccggagagcgaaggacgtcgcgtccccatgcgcgccagaaaaccggcgcagatgatggcgaaaatgttgcccaccacggcagccggcgccagctgcgccacgtaaacgtcgggcgtttgcccgagaatggctgaataggccagcgatagaggcaggatcccttcaccgataccgccgccgatgatcggcacgataataaagaaaaaggtgtggtagaaactgtagccaaccaggctgcccaccagcaggccggttaagatcgccgccccggtccccaccaccagcgggacaaacatacgtaccattccctgaatcaggatggttctgttcatgcccagaatgctgccgacgaccaggcaggcgatgacaaaatagaggagattggcctctttcatcagcaagtgcacggtatcgagggtatgcgcttcgaacatgccgaaatagaccagcaccgacggcgtcatcaggcacaaaatggccgggccgccaacctccttgaggattggcaccatccggccaattttagccagcgcgaaccccagggtcatgattaccgccagaccgccaatcatgttcttcggcagcaggcctgcggtcgcggagatggcaacaattgcggctatcccgataaatagcgccaacggcacggcgccgacctcaatattggataaaagtcgtggcgcctgcccgctcggcagcgttttatctatcgggtggttgagtgagttattttccatatttttacctgaataatgatgtcacgtagggtatcgacgcaatataaaaagcgcgcaatcaaataaataaaaaagtgccaggcaaaataccaatgaaacaaaaaaacgttagcacaggacgttaacattaaaaataaaatccaggttttactgtcgtgctttgtgactaaagcataatatttattttaagtaatttaatttattatccggaaactaaagttaccggcatcggtatagttgaatagcagagagataaagtgatgattctgtccttttttctctatttgtaagtaaagtatttaaggcgaaattatttaaaccccagcgactgtgatgactatcaccttttaaatattatgggatcgctagattaaaaaaacacaacgtagccgataatatattttcaggacatcttatgccttcactgctcttagaatccctttttcccctggtgtttatcatgctgctcggatggctaagcggtaagctgggctatacccgccgcgaggatgcgtccgtactggccacggtggtcattcgtttcgcgcttcccttccatctttttatcggcgcactgaatactcatcccgataagataaaaaacttcacctttatggcggtgttagtcatcggtctgatggggtcatatatcctcacgctcctgatctcacgctatgtttttcgtcatgatattaaaaccagcgcgattcagtccctggtgtgcgcgttccccgacatggcctactttggcgctcccgtgcttgcggtgctgattggtccggagggttttctcggcgtgcttatcggtaacctggtgaccagcgtattgatgatccccctgaccatcatcctgattcgcatggatgacaagcgcggccgcgctgacgcggaacagcctaatccgctgcggcttatcctgcaaaacctgtttaaagccgtccgaaacccgattgtctggataccgatttccggggtactgctcagccttgccggagtacagctgccgcacatgctgagcatgcccattgagatggtgggaaaagtggcgggcggcctctccctgttcgcccttgggctgctattttacggcgaacgtcctacggtcaatattcaaacctgtaccaatatcagcatcaagaatctgctccagccggccatgatggccgtagccggcctcgccttcgggctcagccatagcctgatgcagcaggtcattatcatcggcgcgacgccttccgccattgcggcagggatgtttgccctgcgcagcgatacctatatcgagcccgcctcttcctctattttgctcggtaccgcagtgggcgtcgtcactgaaggattcatgatttatttaatctcttaatcactgaaataaagcccgaagaattccggcaattatttattatgatattcaggagtcatcaaatgttagccacagaaaccttatatacgccctataacggcgccgtgctgctggaaaacccgttattaaataaaggtctcgcgtttactgaaggtgaacggaccgcgtttaatcttcagggtctgctgccgcataatgtcgaaacgattgaagagcaaaccgcacgcgcgtgggggcagttttgccagtttaaacgggatatttcacgccatatctacctgcgaaatattcaggatactaacgagaccctattctataatctgctgcgcagccatatgaaagaaacgctgccaatcatctataccccaacggtaggtgaagcatgtgaacacttctctgaaatttatcgccggggacgcggtctgtttatttcatggcctaaccgtcacaacattgatgagatgctgcagggcttttcccgcaatgatatcaacgttattgtggtgaccgacggcgagcgcattcttggcctcggcgaccaggggattggcggcatggggatcccgattggtaaactctcgttatataccgcctgcgggggtatacacccggcatcaacgctccccattatgctggacgtgggcaccaacaacgcccagcatcttgaggacccgctgtatatgggctggcgtcatccgcgtataagcgacgagcagtacatggaatttatggacatgtttgtccatgccatcacgcagcgctggcccaatgtgctactacagttcgaagattttgcgcaaaaaaacgccacccggcttcttaaccgctatcgtcaccagctgtgctgtttcaacgatgatattcagggcacggcagccgtgacctcaggcacgctgatcgctgccgccgctgccgccggtacgcggatccgcgatcagcgcgtggtgtttctcggcagcggatcggccggatgcgggatagcggaaaaaatcattgcgctgatggttgatgacgggctctcagagcaggaagcgcgcaatcgcatctttatggtcgaccgcccaggcctgttgaccgatgagatgccggatttgctggatttccagcaggaccacgtcacgccgcggaaaaatctcacccgctgggataccgatgcggcccacctgtcgctgatggatgttgtacgcaacgtccatcccaccgtgctgattggcgtatccggccagccgggactgttcagcgaagagattatcaaagagatgcaccggcactgcccgcgtccgattattatgccgctgtccaacccgacctcccgcgccgaagcccagccgaaggatctgctggaatggacccgggggaatgcgctaattgccaccggcagcccgttcgcgcccgtattctatgacggtaagacctacgatatcgcccagtgcaacaacgcctatgttttccccggtctggggctggggattctggccagcaaagcggcgcgcgtgaccgaagggatgcttatcgcctgcagtaaaaccctggccgcccactcgcctttggccacccgcgacgccggcggattactgccgccggtcgacgagattgagatgatttcccgggcaattgccgcagaggtcgcacgcgcggctcagcaggatggcgtcgcgccgcagattgacgaggctcagctggccgcgaatatcgataaaatgttctggcgagcgcgctacaccgcgtataaacgatcgccattttgatcgccatcccagacacatattacgggaagcgcgccggcttcccgccgcaccgggaaaccccgcatgattaatgtgctgattgtcgatgatgattccatggtggccgagctgaaccggctgtttctcagccgggtggcggatttccactgctgcggcgtggcccccacggtccgcgaagccagggagatgcttagccatttggcgcaggtcgatctggtgctgctggatgtctacatgcagcaagagaacgggctggatctgctgcccgcgctacgcgccgatgcgcgaaatattgatgtcattatgattacctccgctgccgataggtgcacggttcagacggcgctgcattatggcgtggtcgattacctgattaaaccgtttcagtttccgcgctttgaggaggcgctgttgtcatggcgtaaaaagcgcgatctgaagtatgcgaaatccagctacgcccaggccgatgtggacagcctgctgcgcagcggggttcagcagcaggaaagcgcacgccgcttgccgaaaggacttacgccgcagacgcttcgtctggtgtgccagtggattgacgcctggcaggagcgtgacttttcgaccaatgaactggccgcggcgctgcagatatcccgggtctcatgccgcaaatatctgatttggctggagcagataaatatcctctacaccaccaaccattacggcatcaccggtcgtccggaatatcgttaccggctcgttgccgatcatttggcgctactcaaacaatacggccaatgaacccggtgagcccattggctgcgattttcacccctgatgcggcttcttcttggggtacagctctttacgcttgtagggctcgatttcacccggcttgcgcgttttcagcagcttgaggatccaggtgtactgctcggtatgcggcttcacgaacacttccacctcttcgttcatccgccgggcgatagtgttatcgtccgcttccagcagatcgtccatcggcgggcgcaccagcaccgtcagacgatgcgttttaccatcatagaccgggaacagcggtacgacgcgggcgcggcagactttcattaaacggccgatcgccgggagcgtcgccttgtaggtggcaaagaaatcaacaaattcactgtgctcggccccgtgatcctgatccggcagatagtagccccagtatccctgacgcaccgactgaataaacggtttgatcccgtcgttgcgcgcgtgcatacgaccgccgaaacgacggcgcacggtattccagacgtaatcgaataccgggttgccctggttatgaaacatcgccgccattttttgcccgccggacgccatcagcatcgccgggatgtctactccccaggcatgaggaaccaggaagatcactttctcgttgttgcgctgcatttcatcgataatttctttgccctgccagtcgacgcgagaaagaatccgctgcggatcgcgcaggcctaactccgccatcatcaccatcgcctgcggcgcggaggcatacatggcatcaattatttcttcacgttcctgctcgcttttttccggaaagcagtacagcaggttaatttgcgcccggcggcgcgaactctttgccagacgaccaacaaaacgccccagtttacccaggatcggatcgcggaaagacgcgggcgtcagggcaattgcgccgaaggcaaaaacgccgaaccacgcgccccagtagcgcggcagtaaaaaggatttttcaaattttggaataaattcaatattattttttttcgtttccatgcccaatccgcagaatttccgcttaataaagataatgggttagtttagcgatacgttgagtaacgtacaaaagaaaaagccggcgcacagcgtgcaccggctttaactgacggaaggttagtcaaaccgcagctgcggaatcacctgttttgcctgcgccagataatcggtacggtcggaaccgctgagcccttccgtacgcggcagtttcgccgttagcgggttgaccgcctgctggttgatccacacttcataatgcagatgcggaccggtagaacggccggtgttgcccgacagcgcaatacgatcgccgcgtttcaccttctgcccgggtttgaccagcagcttacgcaggtgcatatagcgggtggtataggtgcgaccatgacggacggcgacgtaataacctgccgcaccgctacgtttagccaccaccacttcgccatcccctaccgacagcaccggcgtgccctgcggcatcgcaaaatcgacgccacgatgcggcgcgacgcggccggtcaccgggttcagacgacgcgggttaaagttcgaagagacgcggaactgacgtgcggtcgggaagcgcaggaaccccttcgccaggccggtaccgttgcgatcgtagaatttgccatcctcagcgcggatcgcgtaatagtctttgccatccgaacgcaggcgtacgccaagcagctggctttgctcgcgcttaccgtcgagcatttcacgcgacatcagtacggaaaactcatcgccttttttcagcttacggaagtccatctgccactgcatggctttgatcaccgcgctaatttcggtgctggtcaggccggcatcgcgagcgctggcgacaaagctgccgcccacggtacctttcagtacgttattgacccagtcgcctttttgcagctcgctgctcattttgaaaccgtttgcaacccggtcataggtgcgggtttcgcggcgcgacatctcccaggtcaggctttgcaggtcaccgtccgccgtcagggtccaggagagctgttggccgattttcagattacgcagctctttatccgccgaggagagccgggcgatatcgcccatatcaataccgtactgattaagaatgctgctgagcgtatcgccggtcgacaccacatattcatggccgccggaatcgctgtccgctttatcatccagctcatcctgagggatagcttcttcttcctgaggcgcctgatcgatgggttccgaagcctctggcagcagcgaacgaatttcgctttgttccagctcgatggttctggagatgggagccgtttcgggatggtggtagatgtagggtcgccagacggcgaccgctaaggtaagaacgctaagcgaccccagcataacgcggtgaggtcgtggcagattgttaaatgcctgagtgacagcgcgggctatctgttgcacgtattcacttcctcgttattctcctttcaggcagctggaatactgattcgccatctggctcaggaattgcgggtaactctctttacccagcttaattccgattccaagtggatccagggttcccatgcgcacggacgttcccctggcaacagcttcgatgaccgctggcctgaactgtggctcagcaaaaacgcaagttgctttttgctcaaccagctgtgttctgatttcgtgtaaacgctgcgcaccaggctggatttcagggttgacagtaaaatggcccagtggggtcaaaccgtagtgtttttcaaagtagccgtaggcgtcatgaaaaacgaaatatcccttccctttcagcggtgccagctcggtcccaacctgcttgtcggttgcggctaattttgcctcaaaatccttcaggttggcgtcaagtttggctcgactctgcggcataagttccaataatttatcgtggattgcaaccgccgaaaggcgcgctatctctggggaaagccacagatgcatgttatagatgccgtgatggtgatcgtcgtcactattttccccggcgccatggtcgtgaccgtgatggtcgtcgtcgtcgtcggtgcctttcatgagtaacggtttcacgccgtcaagctcggcaatcgtcacctttttgttcggcgcaatgctttgcgttgacttatccataaacgcctccatctctggaccaatccagaccactaagtctgcgttctgtaagcgttttgcatccgatggccgcagcgaatagtcatgctcagaggccccgtccggcagcagtacctgggtctcggttaccccatcagcgatcgctgatgcgataaagcccagtggcttaagggaagtgacaaccgcggcgctggccaacggcgcatgggcgaacaaaaaagcggcgctaagtccagcgcaaagaagcgtatttttatgtaacataatgcgtctaatcatcgtatagaatgagagagatgtgatattataacattcactggcttgtgcaacctctaatttgatatgacaaatcttgtaactctggaaaacgtcgcggtcgtttatggccaaaggcgcgtgctgtctgacatttcgctaacgctaaagccgggcaaaattttaaccttactggggccgaacggcgccggtaaatcgaccctcgtgagagtggttctggggctggtagcaccctcggaagggattatcaaacgcgacgggcatctgaggatcggctatgtgccgcaaaagctgcaccttgatgctaccctgccgctgaccgtcagccgctttatgcttttacgtccgggaacgcacaaacgcgacattctgccagcgcttaagcgcgtgcaggccgggcatctgatcgacgcccctatgcagaagctttccggcggagagacccagcgggtactgctggcgcgggcgctgctcaatcagccgcagctgctggtgctcgacgagccgacgcagggcgttgacgtcaacggccaggtggcgctttacgatctgattaaccagctgcgccaggagcttgattgcgccgtactgatggtttctcatgacctgcatctggtgatggccaaaaccgacgaagtgctgtgcctgaatcagcatatttgctgctccggcgcgccggaagtggtctctatgcacccggaatttatctcgatgttcggccagcgcggcgcggaacagctagggatctatcgccatcatcataaccaccgccacgacctgcaggggcggattgtactgcgtcggggaaatgaccgttaatgattgaactactgctccccggctggctggccggaatgatgctcgcctgtgcggcgggtccgctgggatcgttcgtcgtctggcgccggatgtcttacttcggtgataccctggcccacgcctctctgctcggcgtggcttttggtttactgctcaacgtcaatccgttctatgcggtcatcgcggtgacgctgctgctggcgggcggcctggtgtggctggagaaacgcccccacctggcggtagacacgctactcggcatcatggcgcacagcgcgctgtctctgggcctggtggtggtcagcctgatgtcgaacgtgcgcgtcgatctgatggcctatctgttcggcgatctgctggcggtgacgccggaagatttgatctccattgcgattggcgtggttatcgtgctggcgatcctgctctggcaatggcgcaacctgctgtcgatgaccattagcccggatctggcgtttgttgatggcgttaagcttcagcgggtcaagctgctattgatgctggtgaccgcgctgaccatcggcgtggcgatgaagttcgtcggggcgctgattatcacgtcgctgctgattattcccgccgccacggcccgccgctttgcccgtacgccggagcaaatggcgggagtggcggttggcgtgggaatgattgcggtgaccggaggattgaccttctcggcgttctacgacacgccagcggggccttccgtggtgctgtgcgccgcgctgctgtttattttcagcatgagcaagaaaccggccgcctgacgcttatgcgcccgcgtcagccgccatcaaaactcggctgacggctatgggctcacggccgtctgcgaacgttgtagcccggctaaggccttcacgccgcaagccgggacatcaaaccgcaataccgcttcagctatttccccggcttgcgctccgcttagccgggctactggcccctgaggtctgctgttttatagccggacaacgattacggcatttccggcggcgtaataccgaagtgggtccaggcccgtaccgtcgccattcgcccgcgcggcgtacgctgtaaaaagccctgctggatcagatacggctccagcacatcttcaatggtttcccgctcttcaccgatggccgcagccaggttatccaggccgaccggcccgccaaagaatttatcgatgaccgccagcagcagcttacggtccatataatcaaagccttcggcatccacgttgagcatatccagcgcctgagcggcaatctcctcagagatacgcccgtcgtagcgaacctcggcaaagtcacgcaccctgcgcagcaggcggttggcgattcgcggcgtaccgcgcgcgcggcgcgcgacctccagagccccctcttcgctcatctccagtcccatatagcgggcgctgcggctgacaatatgctgcaggtccgggatctggtaaaactccaggcgctgaacgatgccaaaacggtcgcgcagcggtgatgtcagcgagccggcgcgagtggtcgcgccaatcagggtaaacggcggcagatcgatttttatcgaacgcgccgcgggcccttcgccaatcatgatatccagctgataatcttccattgccggatacaggacttcttcgaccaccggcgacaggcggtggatctcgtcgataaacagaacgtcgtggggctcaagattggtcagcatcgccgccagatcgcccgccttctccagcaccgggccggaggtggtgcgcaggttaacgcccatctcgttggcgacgatgttcgccagcgtggttttcccgagccccggcgggccaaaaatcagcaggtgatcgagcgcgtcgccgcgcagcttcgccgcctggataaagatctccatttgcgaacggacgtgcggctggcccacgtactcttgcagcaatttaggacgaattgcgcgatcggccgcctcttcaaaaccgctgctgtccgccgataccagcctgtctgcttcaatcatcccttacctcacaacgcggcgcggagcgcttcgcgaattagcgtttcactgttggcatccgggcgtacgattttgctgaccatccggctggcctcctgaggtttatagcccagcgccaccagcgcggcaaccgcttcctgttcagcgtcatcgtcagacgggccagccggcgacgtcaggaccagatccgctgccggcgtaaacagatcgccgtgcagtcctttgaagcggtctttcatttcgacaatcaggcgttccgcagttttcttgccgatccctggcagtttgaccagcgccgccagctcttcacgctcaacggcattgacaaactgctgcgccgacatgccggaaaggatcgccagcgccagctttggaccgacgccgttggttttaatcagctctttaaacagcgtgcgctcctgcttgttattaaagccatacagcagctgtgcatcttcacggacgataaagtgggtgaaaatgatcgcctctttacccacgtccggcagctcatagaagcaggtcatcggcagatgaacctcatagcctacgcctcccgtttcaagtaaaaccagcgggggttgtttttcgagaatgatgcctctgagtctgcctatcacatggagctcctggattaagggccgaaagtctaatgcggtatcataaaaaaaggctggatagatatccagcctgatttcaggttatcgtaagcgtccgcgcgccaggttcaggcggctttcgccgatctgagctgcgttctggctgacgtggcaatgggtgatggcgatggctaaagcatctgccgcatccgcctgcgggttagccggcagcttaagcaacgtgcgcaccatgtgctgcacctggctcttttccgcgctgccgatgccgacaacggtctgctttacctgcctggcggcgtactcaaagaccggtaggtcctgattcgtcgccgcgacaatcgccacgccgcgcgcctggccgagcttcagcgccgagtcggcgttctttgccataaacacttgttcgatggcgaagtagtccggctggaactgggtgataatttccgtcacgcccgcatagataagcttcaggcgagacggtaaatcatccactttcgtgcgaatacagccgctgcccaggtagctcagctggcgtccaacctggcggatgacgccataaccagtgacgcgcgaccccgggtcaatgccgagaataatggccatcacgcgcctccggttagtggtttaacggtcggcaacattagagcgttgcggcgacctcatcagagatctcgccgttatgataaacttcctgcacgtcgtcgcaatcttccagcatatcgatcagacgcagcagtttcggcgcagtttccgcgtccatgtccgctttggttgacgggatcatcgagacttcagcggcgtccgctttcaggccggcggcttccagcgcatcgcgtaccgcgcccatctcttcccaggcggtataaacgtcaatcgcgccgtcgtcataggtcacaacgtcttccgcgcccgcttccagcgccgcttccatgatcgcatcttcgtcgcctttctcgaaggagataacgccttttttgctgaacaggtaggaaacggaaccgtcggtccccaggttaccgccggttttggtgaaggcatgacgtacttccgccacggtacggttgcggttgtcggacagacattcaaccattaccgccgtgccgccaggaccgtaaccttcatagatgatggtttccatgttcgcatcatcatcgccgccgacgccgcgcgcgatagcgcggttcagggtgtcgcgggtcatgttgttgctcagcgctttgtcgattgccgcgcgcagacgcgggttagagcccgcatcgccgccgcccagacgcgcggcggtgaccagctcgcgaataattttcgtaaagatcttaccgcgcttggcatcctgtgccgctttgcggtgcttggtgttggcccatttactatgacctgccataaaaaactctccaaaaaaaagcgcgccctttcaggcggcgttaattacaaattcttcaatcgcctgccggttgctccaggacttggtcaacgtggcggcttccgccgcgtcaacccagcgatagtccagatgttccgtaaagacaatctggcgttcatgggggagcgcgagacggaaccaaaactccgtattgcgctcaacgcccggcgcatagcgatgacgtaaatgagaaaatatctcgaattctaccgtacgctgacaatcaaccaaagccagctgctcgcaggcaacatcgatagcgacctcttccataacttcacgcgcggcagcctgcggcgcggtttctccctcttccaggctgccggtaaccgactgccagaacgcgggatcgtcgcgccgctgcaacatcagcacccgcttcgtatcttcggcgtaaatcaccaccagtacggaaacggggagcttgaatgacatcttacttattctccagagactcttttgcctctttcgccaccacctgaataccgagttcgctcagcgatgccgggttagcgaagcttggcgcttcggtcatcaggcaagcggctgcggtcgttttcgggaaggcgataacgtcacggatattatcggtaccggtcagcagcatggtcaaacggtcgaggccaaaagccagacccgcgtgcggcggggtaccgtatttcagcgcgtccagcaggaagccaaacttctcgcgctgctcctgctcgttaatgcccaggatgccgaacacggtctgctgcatctcaccgctgtgaatacgcacggaaccgccgcccacttcatagccgttgatgaccatatcgtaggcgttggccaccgcgtcttccggcgcggctttcagctcggcggcggacatgtctttcggcgaggtgaacggatggtgcatcgcggtcaggccgccttcgccgtcgtcttcaaacatcgggaagtcgatcacccacagcggcgcccatttgtcttcgtcggtcaggttcaggtctttgcccagcttcagacgcagcgcgcccagcgcgtcggcgaccacttttttgttatccgcgccgaagaagatcatatcgccatcctgcgcgccggtgcgctcaaggatcgcttcaacgatgtcggcgttgaggaatttagccaccgggctgttgatgccttcaaggcctttcgcccgctcggttactttaatataggccagccctttcgcgccgtagatctggacaaacttaccgtattcgtcgatttgcttacgggtcagcgcagcgccgcccggtacgcgcagcgcggcaacgcgccctttggcgtcgttagccgggccggcgaagacggcgaattccaccgctttcaccagatcggcgacgtccaccagctccatcgggttacgcaggtctggtttgtcagaaccgtagcggcgctcggcttcggcgaaggtcatgatcgggaaatcgcccagatccacgcccttcacttcctgccacaggttgcgcaccagcgcttccatgacttcgcgcacctgcccggcggtcatgaaggaggtttccacatcgatctgggtaaattccggctgacggtcggcacgcaggtcttcgtcgcggaagcatttaacgatctgatagtagcggtcaaaaccggacatcatcagcaactgcttgaacagctgtggagactgcggcagcgcgtagaatttccctttatgcacgcgggatgggaccaggtagtcgcgcgcgccttccggcgtggctttggtcagcatcggcgtttcgatgtcgaggaaaccgtggtcatccataaagcggcgcaccaggctggtgattttcgcacgggtcttcaggcgctgcgccatttccggacgacgcaggtccagatagcgatatttcagacgcgcttcttcggtattgacgtggttggagtccagcggcagcgcttcagcgcggttgataatcgtcagatccgatgccagcacttcgatggcgccggtggccatatcactattgatgtttttttcgtcacgcgcgcgcacggtaccggtgacctggatgcagaactcattacgcagttcagaggccagctttaatgcgtcggcacgatccggatcgaaaaacacctgtacgatgccttcgcggtcacgcatatcgataaagataaggctaccgagatcacgacgacggttgacccaaccacacagagtcacttgctgccctacgtgggacagacgaagctgcccgcaatattctgtacgcatgagatatcccttaacttagccgcaggcggattgttgcctgtcttgcaggcgacgaggtcgcagctttagctgatgtcacaactgaatgaaaaaaggcggctattatactggaaattatggcgcacgataagcccggcgcagcgcgcagcgttgctttgctgcgcgcttattgcttgtactcacaaaaattaacaaaatttgttaccctcgggcgagatcggcaacggtattgtagcgacctgacaacagaagaagatacggggatatcatgttagaactcaatgcaaaaaaaaccgcgctggtggttatagacctgcaggaaggcattttaccgtttgccggcggcccgcatcgggctgacgacgtggttgagcgcgccgcgagtctggccaaaaagtgccgccagcagggttccccggtggtcatggttcgcgttggctggtcggcggatttcgccgaagcgctgaagcagccggtcgatgcccaggcaggcgcccatacgctaccggaaaactggtggacctatccgctggcgctggaaaagcaggagagcgacatcgaagtcaccaaacgccagtggggagccttttacggcaccgacctggagctgcagcttcgccgtcgcggtatcgatacgattatcctgtgcggtatctcaaccaatatcggcgtcgaatcgacggcgcgcaacgcctgggagctgggcttcaatctgattctcgttgaagacgcctgcagcgcagcaacggctgaacagcatcagggcagcatgacgcacatcttcccgcgtattgcccgcgtgcgcagtaccgaggaggtacttgccgcgttatgatctatattgggcttccccaatgggcgcacccgaagtgggtgcgcctgggtatcaccagccttgaagagtatgcccgccattttaactgcgtggagggcaacacgaccctgtacgctttaccaaaagctgagattgtcagccgctggtatgaacaaacccacgatgattttcgcttctgcttcaagtttccggccaccatttcgcaccaggcatcgctgcgcaactgcgacgacttaagccacgagtttttcacccgcctggcgccgctgtcatcgcgcattggccaatactggctgcaactgccggccacgttcggccctcgggatcttcccgcgctctggcagttcctcgacagcctgccgcgcgaattcagctacggcgttgaggtaaggcatccggagtttttcgccaaagaggaagcggaacaacagctcaatcgcgggctgcatcagcgaaacgtcaaccgcgtgatcctggatagccgtccggttcatagcgccgtcgcccgcagcccggcgatgctcgatgcacaaagaaagaagccaaaagtccccgtccatgcgctggtgacggcccaccatccgatggtgcgttttatcggcagcgatgacatggcgcaaaatcgtgagctgtttagcgtgtggttacgcacgctgccaaaatgggcgcagacaaccacgccgtacttattcctccataccccggatatcgcccaggcgccggaactggtcgacaccctgtggagcgatctgcgcgccgccctaccggaaataggggcggcaccttcaattccgcagcaaacctctcttttctgatatcctgctatcctcaattgagccaccggaagcgataaaagggagttttgagtatggtcagcgcgctgtatgcggttttaggtgcgttattgcttattaagttttcctgggacgttgtacgactgaggacgcaatatcgcgttggctacggcgacggcggttttagcgaactgcaggttgctatacgcgtgcacgggaacgcggtggaatatgttcccattggcctgattctgctgctgtttatggaaatgaacggcgcgcagacctggatggtccacgtctgcggtattttactgatcgccgggcgcctgatgcactcctatggctttcatcatcgtctctaccgctggcgtcgttccggcatgagcgcgacgtggtgttcgttgttgctgatggtgctggcgaacttctggtatatgccctgggagttggttttctccgtccgttagcgcacaatacgccgttttcgatttttcgggtttaacgttatgtctcaccgcgatacgcttttttccgcgccgattgccagtctcggcgactggacctttgatgaacgggttgctgaagtcttcccggatatgatccagcgctctgttcccggctattccaatatcatttccatgatcggcatgctggcggaacgtttcgttcagccggatacccaggtttacgatctcggctgctcgcttggcgcagccacgctgtccgtgcgccgcaatattgcgcatgccggctgcaaaatcatcgccgttgataattcgccggccatggtcgaacgctgccgtcgccatattgacgcctataaggcgccgacgccggtcgaagtgattgaaggcgatattcgccacgtcacgatagaaaacgcctcgatggtggtgctgaacttcaccatccagtttctcgaaccgggcgaacgccaggccattcttgataaggtctatcaggggctcaatccgggcggcgcgctggtgctgtcggaaaaattcagcttcgaagatgacaacgtcggcgaactgctgttcaacatgcatcatgatttcaaacgcgccaacggctatagcgagctggaaatcagccaaaagcgcagcatgctggaaaacgtgatgctcaccgattccgtcgaaacccacaaagcgcgcctgcgcaaggccggtttcgaacatgccgaactgtggttccagtgctttaacttcggatcgttaatcgccgtaaaatccggggaccaggcatgattgatttcagcaacttttatcagttgattgccaaaagcccgctgtcgcactggctggagacgctgcccgctcaggtggcggcctggcagcgtgacgcgctgcacgggaaataccgggaatgggagcgggccgtagagtttctgcccgagttttcgccctaccgactggatctgctgcatagcgttaccgcggagagcgaaacgccgctgggcgacggtcagcgtctgcggattgaaaacctgctgaagaatctgatgccgtggcgtaaaggaccctggtcgctttacggcgtgaatatcgacaccgaatggcgttccgactggaagtgggaacgcgtactgccgcacctttccgacctcaccggacgtaccatccttgatgtcggctgcggcagcggataccacatgtggcggatgattggcgccggggctcgtctggcggtgggcatcgatcccacccagctgttcctttgccagtttgaagcggtgcgaaagctgttgggcaacgatcagcgcgcgcatctgctgccgctgggcattgagcagcttccggcgctgaacgcctttgataccgtcttttcgatgggcgtgctgtaccaccgccgctccccgctcgatcacctgtggcagctcaaagatcagctggttcccggcggcgagctggtgctggagacgctggtcgtcgagggcgacgaaaataccgtgctggtgccgggcgatcgctatgcgcagatgcgcaacgtctactttatcccttctgccgccgcgctaaagcagtggctggagaaatgcgggtttatcgatgtacgcatcgtcgacgcctgcgtgacgtccaccgaagagcagcgccgcaccgagtggatgaccaccgagtcgctggccgacttcctcgatccgcaggatagcagcaaaacccgcgaaggctaccctgccccgctgcgcgcggtgcttattgccaccaaaccggaaacagaacagtcgctggcggcgaaaaagcgggccgacaagcagcctggctaacgcgttttcaggataaaaaaaggcccctgtttaatgggcaggggcctggtacgggcaatcatcatattgggcgacatgatgtgcagcaaaaaacggtttatccccgtcatacttcaagttgcatgtgcgttggctttgttactcggctcatccatgagcctcgcccttacgggccgccgggatacggcgttcaaatctgttccagacagatttgtcgctcaccccagtcacttacttgagtaagctcctgtggattccctgcgtcgccgccttctcgcaactcgaattatttagggttttaatctctctgtgcggaaataatcttcttcatttccgctaccgcttcgccattgacggcgtagcgtaagtattcatctgcttcggcatccgtagacatcgacagcccgggattgcgaaagcgcatcggggacggtaaccactggcctgccgaggagtgcacctcttttacccctgcctgcaaaaatagcggcaggttggcggcgcggacgcctgcaccggccataataataggagtatcgctttgggaaataagttccctgattaatgaaattcctttttcggctgaagactgctggcccgaagtcaggatacgctgaacgccgagttcagccagctcagcgctggcctggcgcgggtcggcgcacatatcaaaggcccgatgaaaggtgacggccagggttcccgccgccgccattatttttttcattcgcgccctatccacccgaccgtcggcgtccagaacgccgatcaccatgccgggaaaaccgagatccttcaccgcggccacatcatcaagcatcgcggcaaattcgccggcggtatagcaaaaatcaccgccgcgcgggcgaataatcggatgaacgggaatggtcaccgcttcacgcaccgatttcagtacccccagcgaaggcgtcagccctccctcctgcggcgcggcgcatagctcgatgcgatcggcgccccggcgctgggcctccagcgcgcactccatgctgtaacaacagacttccagtaaggtcattcttctctccgtcgatagggcaggcactacagaatgtcacgatttcttccggcagacgccgcgtcgcttcacactgttatcgttcagcgtgttcgctggcgacaatttgctcaatcgaccacgggtgaaatttgatcgtcactttgccatccgttaccgccagggtcggattcggtaaacgctcacgctctcctttcggcgcgctggtcttcacaaaaatgcccggctggcccagcccttcatcggaaagcagcgccagcgcgcgggtattgagcgtttcaggatcgcccggcagaacgatttcaatatgctcccagccttcatgcggatagcgcttttcgcccggccacggcagttcaacaacgctaaaacgccagtgcgccacgaccaccggctcatccagcctgaacaggcagatgggtcgaccgttaataacattttccgacagcagagtagcgcattgttcaaagccgcgacgccagcgctccaccgtagcgttctggtgacagcgcagggaaatatggtcggcgtcatggggcgtaatatcgagaccgagccggtgagcaagcgcgttcagcgcctcggtaaagcgcggcaggtccgcggaaatatcgttcagttcatctatctgctgccagttcgccatcgtaagcctcggtactcgctaaaaagcgctaatctatcgcgttttccgcgaccgaccaaccggcaatcgccggcagcgtcccgcgaacggttattcgttgagcgcgaggctcagcaacctccgcgcggtgctgacgcgtgggtgcaaatgcagtatactcctgccctaatttgtccacattcccgcgccgccccatcagggtgacggcgtgttaacgtaaggtgtttcggtgaatattcaggctcttctctcagaaaaagtcagtcaggccctgatcgcggcaggcgcgtctgccgattgcgaacctcaggtccgccagtcagcaaaagtccagttcggcgactatcaggccaacggcgtgatggccgttgccaaaaaactgggcatggcgccgcgacaacttgcagagcaggtactgtctcatctcgatctgagcgggattgccaataaggtagagatcgccggccctggctttattaatattttcctcgatccggccttcctcgcggaaaacgtcagcagcgcgctgaaatcggaacgtctgggcgtggctcagccgcaggcgcagacggtggtcgtcgattactccgcgccgaacgtggcgaaagagatgcacgtaggccatctgcgttccaccattattggcgacgccgcggtgcgtacgctggagtttctcggccataaagtgatccgcgctaaccacgtgggcgactggggcacccagttcggcatgctcatcgcgtacctggaaaaacagcagcaggaaaacgccggtgaaatggcgctggccgacctcgaaggtttctatcgcgaagcgaaaaaacactacgatgaagatgaagccttcgccgagcgcgcgcgcagctatgtcgttaagctgcagggcggcgacgagtacttccgcgaaatgtggcgcaagctggtcgacatcaccatgtcgcaaaaccagttaacctataaccgcctcaacgttaccctgacccgcgacgacgtgatgggtgaaagcctctataacccgatgctgccgggtatcgttgccgatctgaaagccaaaggtctggcggtagaaagcgaaggcgcgaccgtggtgttccttgatgagtacaaaaacaaggaaggcgaaccgatgggcgttatcatccagaagaaggatggcggctatctctacaccaccaccgatatcgcctgcgcaaaataccgttacgaaaacttgcatgctgaccgcgtgctttactacatcgactctcgccagcaccagcacctgatgcaggcgtggaccatcgtgcgtaaagccggctacgtaccggattccgtcccgctggagcaccacatgttcggcatgatgctcggcaaagatggcaaaccgtttaaaacccgcgccggcggtaccgtgaagctggccgacctgctggacgaagcgctggagcgcgcacgccgtctggtggcggagaagaacccggatatgcccgccgatgagctggaaaaactggcgaacgcggtcgggatcggcgcggtgaaatatgccgacttgtctaaaaaccgcaccaccgactacatctttgactgggacaacatgctggcctttgagggcaataccgcgccttatatgcagtatgcctatacccgcgtgctctccgtgttccgcaaggcggatatcgatgaaagcgcgctggcggcggcgccggtggtcatcaccgaagagcgcgaagcccagctggcggcccgtctgctgcagtttgaagaaaccctgacggtcgtcgcgcgtgaaggcacgccgcacgtgatgtgttcttacctgtacgatctggcgggtctgttctccggcttctacgagcactgcccgatcctgagcgccgaaagcgaagagacgcgcaacagccgcctgaagctggcgctgctgacggcgaaaacgctgaagctgggtctggataccctgggtatcgaaaccgtagaacggatgtaaaaacaaacccggcgaaagccgggtttgttttataacgcctgatggcgccacgctcatcagacctgcagcatcattgtagccccggtaagcgtaagcgccaccggggaaattccgcccttctcagaaatacttccgcagatactccgtcaggcacaggatcgccatcgcctggccatacggcatcgacgtcagcggaatgtcgcgataaaaatccagattcgaacccatgccggtaccgaacgacgtttgcagcagctccccttgcgctgaaatattctgcacgatgccgcgaatcgctttttccgcaacctccgcatacgcctggctcacgtagcgcttgcgcaccgctttgaggatcccataagcaaaaccggcggtcgccgacgcttccagataggagtcaggatcgtcaagcagcgtatgccacaggccgctatcgtcctgacagcgtgccagcgccgcaatctgcgcattcagcacctgcaccagataacgccgtaccgcgctgttctcgggtaaatccaccagctccaggaaatccggaataacgatagtcagccagctattgccgcgggcccagcgagcgtgggcgaaattatgccgcccctcatagctccagccgtgaaaccacaggccggtctcacggtccatcagattctgcacgtgcagcagaaactgatataccgcttcctctacgtattgcggacgattaagcagcttgccgattttcgccagcggcagaaccgtcatcatcagcgtgtcgtcccacatctgctgatgattctcttccgccagggtgatgtgctgcatgccgccagactcagtgcgcggcatttcgttcatcgcccactccgcccagctatcgagccagggcagatacgcggggttgcccgtctcttcgtagcggtaagccagggtgagaaacggcgccatggtgttaacgtttttggtggtcgcgccttcggcaaagcggtcggcaaaccagccatcaataatgtcgcgcatcgccgtatcgccggtctgctggtaatactgataaataccgtacaggccgacgccgtgagtccactcccagccgttccaccctttggtgtcgataacgcgtccgtcgtccagccgcagtaaaaattgcccgctttcgtccttaatgttgaccagattgtgcgtcaccttctgaatcagcgcctgcagttcattgcgggcgataaaacgctccggctggcgcagtagtgggctatgtttgacaggccaaactttcatatccttaacctctgttatatgtcgaattcatggctgaacgcggcttcagcgctggcgcggcgggtttattccgattcagataaccaatattgttgtttccccacagggcgtcgtacggcatcccggccagcatctccaccacctcacgatccccggcgctggccagttctggctgagcgcggccggattcacgcattttcagcgtttccgcgcgcaggacgctgtgggtttgcagattgagcttaaagcgcagggaaacgaggaaaccgcaggccagcaccagtaaggtgcccacgctgaggatcagcagaatggtatggctcacttcatagggctgcgttttctgtccggagacaaagcccgacatctgcatgatgatccccaccagcatcaccgctccggcctgggaagctttacgcgtcagggtcatgatcccggcaaagatgccttcgcggcgctggccggtgatcacttcgtccacgtcggcaatataggtgtaggtgttccacggaacgtagttgatgccgccgcggcccaggcccgccaccgcggatatcagcagcagcagcgaatagacatcgctgaggccagcgtagtacagcaccgcgtaagagagcgaactcaggccgaacagcaccaccaccatgcggtacgatggcgccggcccgaagcgaatacacagcgggatcatggcgataaccgcaataaactggaagatcgccatggttccgagcaggttagaagccattgaggcttcctgcatcaggacaaacaccacatagtaggtaaagaccgcattgaagacgtcctgggcgatatagccccccagatacatacccagatgctgacggaaaattttaatgcgcagggtcgaacttaactcaatgaacaggcggttaagactctgcgacaggctcaggttctgtttctcctcttcggcgcgcagcgcggcctccgtccactcttcacgcgggcgttcccaggtaaagaaccagacgaaggtcagcatcatggcgcacagcaccgagaacaccaggctggcatagaagaaagaaacggcgttgtccttaccaaagatagtcagcagaacgcccggcaggaaggaagccagaatcgccgacatctgcgccatagaaatacgcgcgccggagaatttggttttctgtttaaaatcatcggtcatttccggtaccagcgtttcatacggcaccagaatcatggtgtagacaatatcaaaaagaagataggtcagcaggtagtaccagaaccccatatcccctacccacatgatggagtagctaaacacgcaggggatgccgagcaggatgaagaacttacgcctgccaaaacgtttccccagccaggttgagccaaagttatccgtcagaaagcccatcagcggactgattaccgcatccagaaccctggcggtggcaaaaataagcgtcgcctcgataggggaaaggccgcaaaaggtggtgtagaagtagagcagccatgctgctgtgagtgcggtcgttcccgcaccaaggaaatcgcccgatccataggcaaggtagttaaccaaaccgattttacgtgttttcatcgccgtaaatcctgtgtctttttttagagaactccgaaccgcgttttggcccattcagccaaaagggggttgatacatggctacattaagaacatgggaacggcgttaccttttcatttttgccagccaaaagcgttcaatggcaaaaacacaaagagtcgatgaacgcgcctcactgatttataaaacagcgtttcttttaatacaaaagatcggaccaaaagttgcgaagcgaccacaaaaatggcgcagggcggagtgaaatctgggcgcgttatttcgctgcggataaaccttgcgaaagctaaggaatgggagtaaagacaatagaaaagggttgtttcgcgtatctcaaggaggcttgatgccctactcacatctgctggtcgccgtggcgccaaccccggaaagccgggtcctcattcagaaagccgtctccatcgcccgtccggtcaatgcgaaggtcagcctgattaccctggcaacggacccggagctgtataaccagtttgcggcgccaatgatggaaaatttacgcgaagtgatgcaggaggagacgcgcggctttctggccgagctcgcccgccacgccgactacccgatagagaaaatgactatcgccagcggcgggattgcccaccatgtgaaggatttttgccagcggcatcgcgttgacctggtgatttgcggcaaccacaaccagagcctgttctctcgcgccacctgttcggcgaaagatatcgtgggcagcagcggcgttgacgtgctgctggtgtgtctggaaaaaggttagcgccgaaagcgctaaccgcgatcgtctcaggcgagcttggggaaggtcgcgaccttgcgcgctaagtggctctcctcacttcctggctcaatctcctttagatcggcaataaaccgctcctgccagcgatgaatatcgttatctttaatcaccgccagcatggccgaatggcgggcaatacgctcggccagcggcatggttaacgcctggtccagcgcagccgcgacctcgtcgcgatcgtaaggattgacgattaaggccgtcggcagctcgttcgccgcgccggcaaactgcgacagcaccagcacgcccggattttgcgggtcctgcgcggccacatactctttcgctaccagattcatcccatcgcgcagcggcgtaaccagaccgacgtccgagtagcggaagattttcatcagcagcttgcgttcaaagtgctggttcaggtaataaagcggcgtccagcccagctggccatatcggccattaatgcggccggccgcggtttcaagctgatgacgaatatcctggtaggcctgaacatcgccgcgcgacgtcggcgcaatctgggtatagcgaatcttgccgtgatgctgcggatagttctccagcagcgcctcgtaggccagaaaacgctccggcagccccttggaatagtccagccgctcaacggaaaagatattctgcacgcttttcagttcgctcttcagctgcgccagcttcggcggcagcggcccttttgcgctccgcgcaatctcttccggatcgataccgatcggatagacttcggtgtggaaaggtttcccccaggccacatgctttttgccgtcgcgcgtcgtcaggcgagtctgcatcgatacgcaatcgagaaacgccaggcgatcgctctcggtctggaaacccagtaaatcgtaatcgcacagctgttcaagcagctccgcgtgcggcgggagcgcgttaaagacttccggcgtcgggaacggaatatgtaaaaagaagccgatgcgattattgaccccgcgctggcgtagttcgctggccagcggcagcaggtggtaatcgtggatccagacgatatcgtcaggttcgatcagcggcagcagtttatccgccagcgttgcgttgacgcgctgatagccttcccaggcttcacgctgaaaatcaaccagatcgagacgatagtggaaggcgggccataaaacggcattggaaaagcggttgtaatattcgtcgtgatcctgctcgctaaggttaaaggaagcccaggtgatattcccctgcttcactttttttaacggctgctggtcgtcaccgatttccccactccagccgaaccacagtcctccggctgcttttaatgcccccataatccccacggcaaggccaccggcgctggcctttttgtcatccggcggggcaatacgattagatactacgactaagcgactcatagccatctctcctgtcggttagcgcatctggttgttgcccatgattcgcgatgttactaatccaaagatgaacagcggcgacatccggcaggcgccagtgcgcctgggtctcaccgccgcccactttgaccgatacaccactcagttgattgacgacgctaaaacccgcttcatcggttaagtcatcaccgacaaacaccggcctgcgcccgctgaatggagcttcctgcataaaagcggctatcgcttcacctttattcactccgcgcggtttgatctccaccacgcacttacccggctgtaatgccagaatgggatggcgctgcacgacggcctgcgccagcgccagcactgcgtgctgatgctccggcgcctgtcggtagtgcagagcaaaggccatccccttactttccagttcgcatcccggcaagtcatccagcgccgcggtcagttccgcagagagcgccttctggagagaatccggtaaagagacaatatgcgttttaccattgatatcacggcgttcagccccgtggacaccggcaagcggcagccggtaaggacgggtaagctcatccagctcaaccattgagcgccctgaaatcaatgccaccgcgccgttgtgctgctgcacgagctggcgcagcgactgcaaaacatcggcaggaatgaccacctgatcgggatggggtttgataccggcaagggtaccgtcgaggtcaaagaaaaaagcgcagtttccggttaacgcaggcggtacataaatctggtcagccaccctgtttcctccttatcatggccagcaacatgctgggtgttaaataattgtagccatgtaagtatagacagtgtgaccagcctcgccatttttgatagtcattgccagcgcaacgagcgctggcaatggattaggattaaactgaaaagttggacgaatcaaacggctcgtttcgctttctgtttgtagcggtcaaagatcaccgccgccagtaaaatcacgccgcgtacgacatactgcgagaatggcgagatattgagcaggttcatcgcattctctaccgttcccaggatcaggatcccggccaccacgtaggagatcttaccgatcccgcctttcaacgatacgccccccagcacgcaggccgagatgacaatcagctcatagccaattgaggtcatcggctgtccgctggtcattcgtgaagccaggataatgcctgccgctgcggaaaccaggccggaaaggacgaaaatgatgatcttggtccgcactaccggcacgcccgccagacgcgccgcttcttcgttaccgccaatcgccagggtattgcggccaaaggtggttttattcaacaacaggccgaagacaatcaggcaggcaatggtcagccagataggcgctggcaggccaaaccagttggcgtagccgagggtaaagaaacgctcgtcttcaatcccaaccgctttaccgtcagagatgatataggccagaccgcggacgatctgcatggtggccagggtggtgatcagggcgttaatcttcaggcgggcaatcacaaaaccattgaccaggccactcagcgcgccgagcagcagaccggcgccgatccccacccacatgctctccgtcaggttaatcaccaccgccgtggtcacaccggcacaggcgataaccgaggcgaccgacagatcgaaatcccccgatgccaggcaaaacagcattccgcaggccaccattccggacatagaaatagccagccccaggcctttcatattaataaacgaggcaaaattaggcacaaaaatcacgcagccaataaacagcaccgcgaaaacaaccagcatgccgaactgatcccaaatgcgggagaagctaaaagccgaccgggtagtacctgaagtggtaactgatgacatcatagactccttactcaggcgaccgcctggctcacttttggcatggcaaggctcaatgcctgctgttcattcgcatgttcatgcagcagctctccggcgatctccccctcgcgcatcacaacaatgcgatcggcgacgccgagaacttccggtaaatcgctggaggcaaagaccaccgcgacgcccgatgccgctaatgcgtagataacgttgtagatttcatgtttagcgcccacgtcaataccgcgcgttggctcgtcaagcaggatgactttcatctcttccgacagccagcggccgaggatcgccttctgctgattgccgccggagaggttcataatcagctgctcggcgccgggcgttttgatattcagcgatttgatatgctggtcggcgttctgcgcttcccaggcattgttgataacgcagccggcgagaatatgcttgcgacgagcgctgatattgatgttgtcgcgcaccgagtggaccggaataatcccctccgctttgcggtcttccgggcagagcatcatcccggcctgaatcgcctgagccggcttgcgaatatcaatggcctccccgtcgatataaacctggccgccggttattctgctgccgccgaataagcctttcatgagctcgctgcgcccggcgccaaccagcccaaacaggccgacgatttctccgctgcgcaccgaaaggctgacgggctgccgcacgcctggcgccttcacctgttcaagacgcaaacgctctttgccatattcacgcggctgccagccgtagatatcgcccagctcgcgccccaccatcgcctgtaccagcgcgtcgtggttaacctcttgcatattgtcgaaggtacgcacgtagcgaccatctttgaacaccgtaatcgcgtcgcttaacgcgaagatctcttccatgcggtgggaaacgtaaataatgacccgtccttcctggcgcagctcgcggataacccgaaacaggttttcgatttcccgcgcagacagggagctggtcggctcatcaaaggcgataatttttgcgttacgcgccagcgccttggcgatctccaccatctgccactggccgatagagagatacttgagcggcgtttccggatcgatatccagccccagatgcttcagctgcaggccggcttcataattcagcagcgaccggttcacaatcccgcctttatgcggcagctgcccgaggtagatattttccgccacggtcatttccgggatcagatgcagctcctgatagataatggccaccccggcgttcagcgcctcggtggtgtgggtaaacgtcatctgctggccgcggatttgcaggctgccggcggtgggtatgtagttgccgctgagaattttcagcagcgtggatttcccggcgccgttttctcccatcagggcgtgcacctgtccggcatagcagccaaagctaatatcggacagcgctttaacgcccgggaatgtcatggtgatgccgtggaatgagagataaggggtagactgttgcataacgactccgcttttctgtacagagcctctcgcgcaaggcaagaggcccggtcaactggccttacagcccttttttcgccagctcttctttaaagttgtcgcgggtaatcagcaccacgtcggttaccgcggtgaatttcggcggttcaacgtcttttgtcacccagttgtaaagcatttcgctggttttatagccgtgaatatccgggcttggcagcaaagagccatagaaaccggtggcctgcgctttagaaagttcgttcaccgcatcgacgccgttgataccgatcccgataacgtcgggcgctttaaagccctggccttcggtggcgcgcacgccgcccagcacggtgttgtcgttcatgccgacgatcagccagtgcttaacatcaggatgttgaaccagcatggagttaccggcgtcaaacgcgccggggatgtcgttagatttggttggcacgcgatagatttgttgctccgggaaaccggcggctttcagagcgtccattgagccggtagtgcggcggcgggcggtatccagctcgtcggaagtaatggccataaccgcggtatccttcacgtcccaaccgcgtttctgcatctctttatagagctcctgcccctggcgcgcgccgatttcgctggccgccatcatcaccagcggtacgctgtccatcggtttgcctttggcgttgacgaactggtcatcaacggtaatcactttcatatcatagccgcgcgctttggcgacaatggccgccccgagcttcggatccggggtgcaaatgacgaagcctttggctccgctggccgccaggctatctatcgcgttcagggttttctcgccgtcgggcacagcaattttaatgacatcgaaacctaaatctttaccggccttatcggcaaatttccactcggtttgaaaccaaggctcttcaggctgtttcaccagaaaacccagcttaagcgtctcagccatagctgattgtgacataaccgcggcaagaccgattgccgccagcgctttagtaaatttgtgcatggtaaactccagctttaattcgcttttatgtagggaataataagtcttaaatttttaatcggacgaaaaacaaggcattagaaaaatctcaacgctgagtgccgttgtttaaatagtattaaccggaaattatttctccatacgagagcccaatcacatcgcggaattacagtaattgcgtgcatataaacagcgaaaaatgacataaaaaaagcgctaattgtcagacaattagcgcatgccgtagcaatattctctatatcatcagcagagttatccctgtagagattaccagcgacaataaatgtgctccgcatgattgcgaacgggcgcctcatcccccaataaacgggcggctacggtaaacgaaaaatcaaaaacgtgtcccaggcctttaccgctaatcaaattaccgtcctccactaccgcctggtccacgtactctccgtccgtaacgtgctgccataactctcccgaacagacgtagcgtcgccccttgagcagcccgttgccaccgagcactctcgctgccgccgaacagatcggacagatcagctttcccgcggtatcgtgggccgaaataaacgccacgacgtcccggctggcggcaagattgacgcttccctgcgggccgccgggcagaaccaccgcgtcgtacagtatcccgacgcgctctgttagcgtgctgtccgccaccatggggatatcgtgatagctcaccaccgcgcgcgaatcggcgcaggagagcagttcgacatcgaggtgtaagcgacgaagaatatcaatcaccacaatcgcttcaccttcctcaaaacccggtgccagcagcaccgcaacttttttcatttccgactccttcagatagcctgttagcaataatgtgtttacaaaagcagcatctttttaaattaacctcatcattttctcactcgcaggctaccacaaaatagaattattaatcattatttttaaaacacaatttcaacaaaatcattagaactactatcaattaatgaagcgcggaaataaaaacatttaaaatcagcaaaataagcttatatgcgatcgttaaacatcagactttattcttacaaaagcccctcttttcaagataaatacggatgttgtaacgaaatgtaaacatcactcattgagagttttcttaattcaaatatggcgctattctatatttgttgagataagaaatttaattcaaacggctgtgcagaaatcctgaatactattactcaggactctctctgtgcaccgtaatttctaaggcgaccctgatgtagatgcgtcaagatatgacgcccgccccctccaaagtgaataaggatatttgtatggtcgtaccaggaatggttcaaaagctgaataaccagatgaatcttgagttctatacctcaaatttgtatctgcatttgagcgaatggtgtactcagcaacggttgaacggtaccgccacttttctccgtaaccgagcgcaagccagtatcacgcagatgatgcgggtctttgattttatgaaaaaatcaggcgcctggcccgttgtgaaagcggaaggaacctacggcactgaatgttcgtccctggaagatctctttagcaaaaccgtcgaagattatcagcagcgcagcacgatactttccagcctggcggaagaggcgaaggcgcaaagcgatgaatcaaccctgcgttttctgacgctgcttgctgaagagcaggatcaggatggcatactgctggagaccattcttgaagaaatccgtcatgcgaaaaatgccggaaccagcgtacaacaaaccgatagccacctgctggatctggtcagtcaacagcgcgtataacgccatgccggcggatgctcgccggcgataaatcatcagaattctcctgttcgggccagcgctctctttaatcgcaggttccctgtcccccttctttttcggcgcttcggcgccgtttttattccagaaaagcattaaaaacttttaaccagatctcattcctgctccgccggaggaattagcagggtattggtgatctggatcacgtttaaaactacgggttgataatataaaaacactgtttcaaaaatttaaaacacggagtttactttaatggcaagatatacggcttcagccccacaggggctgcagggaagaccgattttgttacgccatcagttagcctacggcggcgggaatttactgggaagcggcgcactggcgatcagcggcgcatggctgctctatttttatacaaccttctgtgggctgacgctgatcgaagcctcctttattttttccgtcgccagcattatcgacgcaattagtaatccgctgatgggctatctcaccgataactttggcaaaacgcggctgggtaaacgctttggtcgtcgccgtttctttttgttgattggcattccgctgatgatgttctacccgctgctgtgggtagaaggcctcggcttttggtactacctgtgcacctacgtcgtctttgaaatcatttatacctcgattatggtcccctatgaaacattggcgaccgaaatgaccgacgatttctcactgcgttcgaagcttaccggttataaagcgattttcggcaaactggccaactttctcgcggcatttatccccgggcagttcatcctgctttatggtaaagaatccgccaccccgttttttctcaccgggctgacctacggcgtcattcttatcgtggccatctcctgcctgtggtactgcagctgggagcgtccccgcgaagaggagataagcaagggagagaaaaagggactgttcaatactctgctcatgctggcgaaagatatgcgctcaacgttttacctgcgcgtattccgcaaacacctgggtatgtatctctgcggcttcggcgccgagtggctttttgcctcgatcttcacctactttgttatattcgtgctgcagcacgatccggcgatggtggccgggcttaacagtctgaactccatcctccagctggtatcaacggccctgtttattggcctgtgcgtgaagaaaggcttcagtaagccgtatattctggcgctgagcgtggttatctttgccgtgctgctctacacctcgctgtggttcttccacctgccttcaagcctggccaccgtcctgatgtttggcatcactgtgctgttcggtctcggcaccggcggcgtgtactatattccctggaccgtttacacctttttggcggatgtcgatgaaatctataccggccgtcgccgcgaagggatctatgcgggagccatgactttctccggtaaaattttgcgctcgattatcgtcttttccatgggggcgatcctcagcttctacggctttcagtcgaaagcgcatacgcagccagagagcgcggtcaccgcgattgcggtggtgttttgtgcgggcgtgattctgctggcgctggcagccattgtgttcagtaagcagatgaaactcgatcgcaaggcgcatctggtagtgctgcaggaagtcgcgcgtattaaagctggcggtaagatcgccgatatcgcaccggacgttcgccttgtcgttgaagatttagtcggccaccggtacgaagagtgctggggcaacagcaggctgtttaaagatacgcaggaaggcgccgttcaaaccgccgtctcccactaacaggtgataacgccccgctatcacaatgatggcggggctgacgccgctagtgcgcttcttcctgcggggtgaatttcagttcaatcagcgcgatggccttttgtaccgccctcagggtcaccgggtcagccgatgccgggtggctggcaaaatcgatggctttcagctgggtggtcattttttcgcgcacctcgacgggggcgatgacgtcgatgacgtcaaggatctgtttgataactaactggcaggcaaccacgtcagagaccagctcgtcgtgctcggtaagatgttgagacatttttcactccttttttcaggagcgtaatagtaccctaaatcccgggatataaaaaaacctgccgcagcaggtttttttatcagaacatagcgccaggcggtacgtctttgaaggttttgcagtagttttcgaacatgctcttcaggattttgcgcagtttcatggttgactccatttttgttatgcaggtgttaatgcctcgatggttataatatgacttacatcacaaaaatcaatctaaacgtgcgccaaatcacctattttttaccaaaataatttaatttttaaacaaaatgagcaggaccggatagtgaagagccgaacgctccggaccaatctgcgctctctttgctatggcagcgacacaataatgagtacacacacctcttccagggacgaccgttctttttcagcacctgcgctgctggtggctggcgccttttttatggagtttctcgacggcacggtgatagccaccgccctgcccgacatggcgaaagattttggcgtgacggcggtcgacctcaatatcgggattagcgcttatcttattacccttgcggttctgataccggccagcggctggatcgccgatcgttttggcgcgcggaaaatctttactctcgcgctggcgatttttaccctggcgtcggtattttgcgggctgtcgaccaacgtcgatgtgttcgtcgcgatgcgtattcttcaggggataggcggcgcgctgatggtgcccgttggccggctggcggtactacgtaccacaccgaagcaccagttgattaaggcgattgccaccctgacctggccggcgctggtcgcgcccattattggcccaccgctgggcggatttatcacccgctacgccagctggcactggatcttctttattaacgtgccgctcgggcttatcgctatcgccctgtcgctgcgtatcattccgaatattcgcgaagatgagcagcgccccttcgacctttccggctttgttgccacctcggtggcgatggttagcctggtcgccgccatggagctgctcggcgatcgccagcctctgggctggcagacgctggcgctgctggcgttgggcctgggctgcatgctcttcgcgctgcggcacttccgccgcaccagatggccgatggtgcgccttgatgcgctcaagatccccaccttccgggtcaccatgtacggcggttccctgttccgcgcctccattagcgccgtgccgtttctgctgccgctgcttttccaggtcggatttggtatggaccccttccactcggggctgctggtgctggccgtgttcgtcggcaacttaaccatcaagcccctcacaacgccgctgatccgctggctgggctttcgccgcctgctgctgattaacggcgcattaaacgttttgtcgctgctggcctgcgcttttttaacgccgcaaacgccggtttggctgatctttgtgattctctatctcggcggggtcttccgttctatccagtttaccggcatcagcacgctcgcgtttgccgatgtgccttccgcgcaaatgagctacgccaatactctgttcagcaccgcgtcacagctggccgtggggctgggcatcacgctcggcgcgataggtattcgtcttggggaaacgttcagcgaatggtttacgctttctcacctgccgggcatcagcttccgcctgtcgtttatttttatcgcgctgatttgcctggtcggcatgattgatagcctgcatctggccaaagaggcgggtagcagcgtatcgaacaaaaagaagtagccaaagaaaaggccagcagcgctggcctttagcatctcatcatgacgggatattaaccgacgatctggcgcacaaacgcttcgatctctttatcctggcagttctcaaagaagcactgctggaaacgagggccagaaacggcggttttcaccagctccggatcgatcgcgcgcagcgtatccagatagttttccttaactaccgccgcttttaccgcgttcaggatcccggcgttacgcacctgaggctctttacgctccggcggataaccttcaccgttgcggccggtaaaagctttttcaaagataaagcgtacgttcagctctgcgccccagccaaaacccttcgcaaacggcagagaaagcgcgttaccgttgttgatctgcgcaaacaggaaggcatccgcagggtcgatacagtagccgcataccacgccagggtgaatattcagcgacatcagcgcgccctgcccggtaccgcagccggtcaccacaaaatccaccgctttcgaattcagcaggatgctggccatgatccccagatgaatataggtcagatgatgatcgttttcatcgctcataccgacgttgtaaaccgggaagcctttttcttcagcaacggcgtttaactcattgaggatgatggcgtttttgttcgcctggctgttttccatcatcagtgcgattttcatgctttactctcctgaatgctctgcgggcactcccgcgatagttcgttagcgttgctatgaacaatactaccttacgaacatactttcaaattttatgaaaagttgttttataaattgcatctcgcctcacacttttgacttccgtccccggctggtacggcatccccccacccttacccacgtcaggctaatcccgccgcggccgccgggcgggtctattttcaccgctaaattaggcgcaacgatttttcgcatggaatattaaattaaaaccattctcattatttttaaatcgccaatgcgtgttattcccatttgcattattaataaatgattttattaatttactttttgcaaataaattaataacaaattatagtgagcgcacaataatccttaattctattttcccggagcagcctgatgctaaaaactgaaatgatcgacaagctgaatgcgcagatgaatctcgaactttattcctctctgctttatcaacaaatgagcgcctggtgcagctaccacagttttgaaggcgccgccgcgtttctgcgtcgccacgcgcaggaagaaatgacccatatgcagcgcctgttcgactatctgaccgataccggcagcctgccctgcatcacggctatcgcctcacctttcgccgaatatgcgtccctggatgagctatttcgcgtcacctacgaacatgaacagctgattacgcagaaaattaacgaactggcccatgcggcaatgaccagccaggattatccgacatttaatttcctgcagtggtacgttgctgagcagcacgaagaagagaaactgtttaaatccgttattgataaattgacccttgccggtaaaagcggtgaaggcctgtactttattgataaagagctggcaacgctcgatacacaaaattaataattacggcagcgacgcccggcgttcgctgccgcatgagtatcaatggcggcaaattttactttcgtgcgtattaaatccttcctcagcagcaataaatttgccttttttctgcaaaaacgccaccagctccgccgcgctcagattttccgccgagcaggtatggaatcgaacctctttcccaaaacggtcgataatcgccgcttccagcgtagcaacagtgtaagactcgcctgatgaaatcatcatttgcagcacttcgtgaccatgaatcgatggcataacccctcccgtaaaggccgaagaataaaccagccagagcggcggattcttgcgccagcgcagctttcgcgcaaacccctgacatcgtaaagttaacattacactccctgtaaccctcatttgacgaactcactgatttcacatactctgcgcggcataattaattgtgtattccgtgatggatagagaaaagcgtgaagaaccgcactctgggtagtattttaatcgttgccggcaccacaatcggcgcagggatgttagcgatgccgctggcctcggcgggcgtgggtttcggcgtaacgtttggtttgctgataacgctgtgggcgctgatgtgttataccgccttattgctgctggaagtgtatcagcacgtgccggctgatatgggactggggtcgctggccgcgcgctatctcggccgctacgggcagtgggctaccggtttttgcatgctgtttctgctgtacgctctcaccgccgcctatattagcggcgccggcgagctgctggcctccagcctcaaccagtggctggactggcgactgcctcctgcggcaggcgtcctgatttttaccgggatcggcgggacggtagtgtgtatcggaacctcgctggtcgatctttttaaccgctttctgttcagcgcaaaaattatctttctcgccattatgctggctctgctgctgccgcatattcaccaggtaaatttgttgacgctgccgctacagcagggactggctctgtcagcgattccagtgatttttacttcgtttggttttcacggcagcatacccagtattgtgagctatctgggcggggatattcgcaagctgcgtcgggtatttgtcatcgggagctttattcccctggtcgcctatattttctggcagctggcgacgctcggcagcattgactctcccgtctttaccgcgctgctggcaaaaaatgccgggcttaacgggctgctggaagctatccgcgaagtggtcgcctcaccgcacgttgagctggcggtgcatctgtttgccgatctggcgctggcgacgtcatttctcggcgtggcgcttgggttattcgactatctggccgatctgtttcaacgccagaacagcgccggtggacggatacagagcggcctgattacctttttgcccccgctggcgttcgcgctattttacccgcgtggcttcgtgatggcgttaggctatgcgggcgtcgcgctggccgtgctggcgctcatgctgcctgcgctgctggtcatgaagagccgcaaacagcatcctgatgcagcatggcgggtcgcgggaggctcagcggcgctgtggctcgtcctgctctgcgggatcggcatcgtcgcgatccagttcgcgattgccgcaggcttgctgcccgcggtggggtaaaaagaagggggccatattggccccttcttttatttggctaaacagcactgcttatatttcttaccgctgccgcacgggcaaggatcgttgcgccccaccttcgcctcattccggatgggctgctgaacttccgccggttgcgcgtgctcagtccagtagttataaagcgccagggcggcaggacgaattcgctcaacgctggcgacaaactcttccgcggataattcatcaagcgcctcaaatcgctcctcggtaccgtgcagggcaatcacgtccagctccgcctgcagctcagccggcaacgcggaccagtcgctcagtcccaccccgcgcatatagccgaagcaccactcttcaacaatcgtgagctcctgcccttcctcttcgcggctgccgaacatcggttcgaactgttcgggataatcgctcaagcgctcggcgatatcgctcatttgctgcagcgtcaggttcacaaaacgatcccgctcgcgatcgttggcccagcgcggcacgttatccgctccgccccagatagcaagcagccactgcgcgggttcaatctccgtcggcccggagagaatggccgtcagcagcccatcaagctcggcaacgtccatgatggtgccttctaccgcgtatttcgacaggatatcgtccagccattcaacttcgctttcgttcaggggtccagttttcataaacaggctcatcgtcgtaaaaaatggcgcttacagtagcggaaatagcgagagaaaaccacccggctactcaaggttcaggctgcgcagcgtctcagcaatctcacgaaaggcatccggcgaaagcggtagcaggggacgcggcaaacaatcctcaccgcacagaccgaggatcgtcgccgctgcggcagtgacccgcaggcttccgccatacttcctgtagagcgtccacagcggctccagcctggcgcttattgcctccgccagctgagcctgcccccgcgtcgcggccgccgtcagctctttggcgacgtacgggaacaggccgccgcacaccgaataccagacttcgcagccggcgttcaggccatcggccgcgcaggcgtctccgctaatcccgatcgtcacctcagccggtagctgccgccgcaggctctgaacgcgccgtgcgacgtcatttttagcggggcccggtattttaattgaagcgattcccggtagcgcagcgatcgcgcctttaagcgcatccgaggtcgtcacgtgcgtggtcacggggttatcgtaaacgcagacgggcacggagacttcgcgggtgacggtctggtaaaaagcaaaaatctcctcttccgtcaggggctgataggcgattgccggcaggagcagcgcgttggcgccagcccgctgcgcatcctctgccagtcgaaggacccgatcggtccccaacgcgccgatccctgccataagcggcaccgctccggcatgcgatttggcctgtcggataacctgtattctctgctcgcggctgagccaggcatagcttcccgtggaaccgagcacgccgagagcatcgacggcagattcggcgaggcgagtgacaatccgggcaaaagccgtttcatcaacgccatgctgatgtaacggagtcagaggaaaagcgcagaggccagtaaacatttcatccccacttattgagataatgatagattgccgacacagagtaacaacagatgcgggttttgtcctatgacaaaaatgaatgaggtggggctgaggttcaaaagcgaggttatggcaatacaaaaacaaaaaaccacccgtaggtggtttcacgacactgcttattgctttgattattctgctttatcccaatggtacccggagcgggacttgaacccgcacagcgcgaacgccgagggattttaaatcccttgtgtctaccgattccaccatccgggctcgggatagaaattggaggcgcgttccggagtcgaaccggactagacggatttgcaatccgctacataaccgctttgctaacgcgccttaatgcttgaacacccgctgatgccgatgttttaaactggagcgggaaacgagactcgaactcgcgaccccgaccttggcaaggtcgtgctctaccaactgagctattcccgcatcatcaagctaatttgctaattacttgattttgttatcgtctgtcagacagtgctgccgttcgatgcgttgcattctacttacctggcgcaatgagtcaacgatattttttaaaaccttgtgttgtttgctgaaaattgcgccgaaacgatcactgatcaagcaaatcgccgcgcgcagcgttcaaatactgcagcatggaccacagcgtcagcaccgccgccacgaggaacagaccaatccccgcccattcaacccagatatttgggcgccacagcatccacaccagcgcggccatttgcgccgtggttttgactttgcctatccatgacaccgccacgctgctgcgcttgcccagttcggccatccactcgcgcagcgcggagataataatttcacgcgcgatcatggtagcggccggtaacgtcacccaccaggtatggtaatgctcggcaaccagtaccatcgcaatagccaccatgactttatccgcgaccggatcgaggaaagcgccaaaacgcgtgctctgattccagcgacgcgccagataaccatcaaaccagtcggtcaccgctgcgacgaagaaaattagcgcacaggcaaaaggggcccaagtaaacggcagataaaacgccagtacaaagaacgggataagaatgacgcgaaacagagtaagcaacgtagggatattaaattgcatagtaacgggtaactatctgttgtaagtaaaaattagccctatgttgctacagagctcctaatgtttcaacgagtagaagatcttttctgccagaccgtgagatatacccggtacttgcgcaatttcttcgacgctggctttctgcaacccttgcagaccgcccatatatttaagcagcatctgtcggcgtttgggtccgactccctcaatggtttccagcgtgctggtgctttttacttttgcccgtttcttacggtggccggtaatggcgtgatcgtgcgactcgtcgcgaatatgctgaatcacatgcagcgcgggggagtccggcggcagactaaagccctcgccttccggttcaaagaacagcgtctccaggcccgctttacgatcgctgccttttgccacgcccaataacagagggtgacttttatcccacggcacgtccagctcggcaaaaaccgtcttcgcctgcccaagctggcctttaccgccgtcgatcaggataacatcgggaattttactctcttctattgccttaccgtagcgacgacgcaggacctgattcatcgccgcataatcatctcccggcgtgatgccggtaatattgtaacggcgatactctgcgcgcagcggtccgttgctatcaaaaaccacgcacgacgccaccgtctgttcgcccatggtatggctgatgtcaaagcattccatccgattgacggccggaagcttgagtaatgtcgccagcgcccgcaaacgttgcgtaatcgttgaatgctgggaaagcttggtggtcagcgccgtcgcggcgttcgtgcgcgccagcttcaggtaacgggcgcgatcgccgcggggtttggtctgtacgttaacccggcgcccggccagctctgagagcgaatccgccagcagggttttgtctcccaggttaaaatccagcaggatctcgcccggcagcgtccgcatctggctgccctgcaaataaaactgcccgacaaaggtttccaccacttcaccgagttcggtgccattcggcactttggggaaatagctgcggctaccaaggactttaccctggcggataaacagcacgtggacgcacgccatgccggcatcaaacgagacgccgataacatccagatcgtcaccggtattggagacgaactgtttctccgttacccgacgtacggcctgaatctggtcgcggatccgcgctgcctcttcaaattccagcgcctggctggccttttccatgcgggcaatcagctgagtcagtacctgatcgtctttgcccgccaggaacaggcgcacgtagtcgacctgctgggcatactcttcctcgctcaccagtccggcgacgcacggccccagacagcggccaatttgatactgcaggcaaggccgcgaacggttgcgatagacgctgttctcacactggcggatagggaagattttttgcagcagcgctaacgtctcgcgaaccgcgtagccgttggggaacgggccaaaatattcgcctttcgcatgcttcgccccacgatgcgtcgccaggcgaggatgcgtatcgccgctaaggaaaataaagggataggatttatcatcgcgcagcagcacgttgtaacgcggctggtatagtttgatgtagttatgctcaagcagcagcgcttccgtttcggtgtgggtcacggtaacgtcaatctgggcgataagcgccaccagcgcttcggttttacgcgaagccaggttgctgcgaaaatagctgctcagccgctttttcaggtctttcgctttgcctacatagataacagtcccgccagcgtcatacatgcgatagacgcccggctggctggttactgttttcaggaaagcttttgcatcaaaaacatcactcactgacttgctaacgactccgcattgcacaggccatggcgaattgccaggtgcgtcagctccacatcgccgtgtatgttcagtttactgaacatacgatagcggtagctgttcaccgtcttgggactcagattcaactgctctgagatctcgttgaccttctgacctttagtaatcattagcataatctgcaattctcgctcagacaaactggcaaacggcgactccgccttctccggttcaatctggcttagcgccatctgctgggcgatatcagaggcgatataacgctgacccgatgccacgcagcgaatcgcattcacaacctcctgcggcgcggcgcctttactgaggtagccagcagcgccggcctgcatgactttcgccggcagcgggttttccgtatgcacggtcagcattatcactttggcatcagcaacggaacgggcaatttttcgcgtagcctcaaggccaccgatacccggcatgttcatatccatcaggactacatcaacgggattcgcgcggcaccatttcacggcatcctcaccgcagcaggcctcgccggcaactttaatcccttttatatcttccagaatgcgtcgtatccctgcgcgcaccagttcgtggtcatcaacaagaaggacgttgatcaaaggaatattctccagaattagggataacgctactgatagcttatctcccacatattaccgggttttaacctaattttgaaagccaaaaaatgtgctgggaaagatttcttacgcaattatggaaatttgtctgcacacccgctggaaagccatacataacatagagttgtacaacagttattttttaacattcatcatacagattacgtaaaaacacaacacattgcgtaggcgataaatatgtgcctgaatatgtaacaattattaacacgaaaacggggcgtacgaaaaaattaacacgcttagatctcatgaatacgtattattcagtcaattaaatcattcaccactcggatgaaagaacagaaatcaagcactccttttttttcctttgcttgtggtatactgcgccgccttcacttttagtcatgcgcaattgcgcagaaagcaaccgaggatatagatgagcactccagatttttccactgcggaaaataaccaagaactggcacaggaagtttcgtgtctgaaagcaatgataacgctgatgctgcaggccatgggtcaggctgatgcaggccgcgtgattattaaaatggaaaagcaaatcgcgcagatggaagatgaggctcaggctgccgtattctccagcaccgttaagcaaattaagcaggcatatcgtcagtaatcaattaccggctgaaggtattactaacagccggtcttacgtctggcacgcagaacaacacatgagatcaaattaagcccgtcgctacggcatagcaggcgatttgggttttgtttggcgcgttgaattttcgctgcatatttttctgatggaaattgacggtattttctgagatagacagaatcattgccacctcagccgaggttttcccttccgccgtccatttcaaaatctccagttcacgtcgactaaatttcatttccggcggcataaccatctcgtcctccaggcgcaaaagcgtcagcaggctcaattcggttagcgttcttaagcgcatctccagctcatcttccgcaaagggtccctggctatggctggttcctgaaacggataagaatccctgagcatggttcggtagcgtcaggcactgcgtgacgcccttgcgtaatccatggtcgcgcgcgccgtcccataattccggtgtatcatggaatagcttgtcgttccatggcagatgcccacgaaggaaattctccttgcgcagcaccgggtcgatcgccagataattctcggcttgataatgcgccatccaggcctgaggataggtcgattgcagcgtcaccctgggccgagtaaaaggcacgggatgccgtacgcagagtgcgaagtagtcatattccagcccttttgcttcctgctggagaagatgataaaccccctctcctgcagaaacggactgaaattgttgcagcatttcccgccgccagctgaaaaaatcattgtccctcataactaaccaaataactcctgagtgataatcattattataaatacataaaactaacacataaaccctgcttatatgtataaaaaatggcagctaccgcatttattagactacgtccggcgaaagtaccggatacgttaaaaaattatgccaattgacgtggcacaaaaccttgacagatgtatcgtcgttgcttatgaccaccatccggacatactttttttgctgataaaccggttattcagcgctgcccggccgcatccgtcagacaagcctgagcgaatgcggccggcgcggggcgattactgcatcaggaatttttcgaggaactggcgggtacgcgcgtgctgaggattggcaaacagcgcttttgcttcaccctgttcaacgatacgcccctgatccataaaaatagcgcggtccgccacgtcgcgggcaaagctcatctcatgggtcacgatcaccatcgtgcgcctctcctgcgccagctggcgaatggtattgagtacctcccctaccagctcaggatctaatgccgacgttggctcatcaaacagaatgacatccggacgcatcgccagcgcgcgagcaatcgccacgcgctgctgctgcccgccggacaaacgacgcgggtagctattttctttaccggtaagcccaactttcgtcagcagttcacgcgcccgggcgatggactcatttttatcctcccctttaacgatgaccggcccttcgataatgttttccatcaccgtacgatgggggaaaagattaaaattctgaaacacaaagcccacgtgctgacgcaggcggcgaatggccgttttttgctggttgatgctgcgcccggcatcgatcgtcacgtcgcctacgcgaatcgtgccgctttccggctgctccaggagattaatactgcgcagcagcgtcgttttccccgaaccgctgggaccgataatcgccaccacttccccttgttgaacctcaaggtcgataccatgaagcaccgtctggccatggaattttttcaccaggtttttgacttcaatcgcactcattttggatctcgctcctggcggttcagctgattttcaaaatagttttgcagcgtggaaagcaccgttgccattacccagtagataagcgaagcggccaggtacatggtgaatacctccagcgtccgggaggtgatcagctgagcctgacggaacagttctggcacctggatagttgccgccagcgaggtatctttcaccaggctgataaaactgttggaaagcggcggtaacgccacgcgcgcggcctgaggaagaatcgcgcggcgcatagcctgccagcgcgtcataccaatactcgccgcggcctcccactgtcctttatcaatggatgcaatcgctgcgcgcagcgtttccgccgcgtaggccgccgtgtttaaagacaggccgatcatcgccgcgggaataggatccagctcaatgccgaactgcggcaagccgtaatagatcataaacagctgcgcaatcagcggcgttccgcgaaagatggagatgtacatccgcgccagccatttaatcggccagacgggcgacatgcgcatcagcgccagaataaaccccagcacgaggccaaaaaacatgccgccgatgctgagctgtagcgtaaataccgcgcccttcagcagaaaaggcgcggaatcaataaccagttggatactctcttgcattctatgtgttctgcattagatatgaggatgataggcgaacagcgcaggcgcgccgccggtgtgaacaaacagtattgggccttcatccttaaagcgcttctggctgataccatcaatcaatccggccatcgccttcccggtatacaccggatccagcaggataccttccagctgcgccagcagcttcaccgccgccatctcttcgtcgttcggtattccgtaacccggcgcaaagtactcatcccacagctgaataccggcctttgcctccagttccagactatttgccaccgcctgctgcagcgcagccacttttggcagctggtcagccacgctgcgcgatacggtcacgccgataagctcggcattgggcatcagctgctccagtcccacggcgaggccggcatgcgtaccggcgctgccggaggcgacgaccacggaggagagctcgaccgccccttcgcactgctgggcaatttccagcgcgctctccacatagcccagcgcgcccagcgcgttcgaaccgccaaccggaatcacgtacggacgatagccctgagcttcaatgcgggtcgccagcgcttccagctgagcattaggatcggtcagcgcgtcgcacatttcgacctgagtattaaacaggtcaagcagcaggcggttaccgttggtcaggtagttctcagcccgggtacccattggattctccagtagcgccacgcagtgcaggcccagcttagccgccaccgccgccgtctggcgcacatggttggactggatagctccggcggtaatcagggtatccgccccttctcgcagcgcttcggcagccagaaattcaagcttacgtagcttgttgccccccatcgcaagcggggtcacatcatcgcgcttgataaaaatttcgcggccaaggtaatcggacaagcgcggcagatattccagcggcgtcggcgcgccaatcagttccagacgcgggaatagggttaaattttgcagtgacataagacctcctgactgaattatccttgattatgcacgctgtgacgcgcgaaataaaaaaaggcgctatcaggagcgccttttttcaccgctggccgttacttcgtgacgtcagcgccaaaccatttttccgacagcgccttcaggctgccgtctttttgcatatccgcaatggcgccatcaaccgctttcagcaggtcttcattacctttgcgcagcgcaacgccggattcctggcgagagaaggcttcaccggtgacggcaagggtgttaccggttttcttcaccagatccagcgctgccagacggtcaaccaggatggcgtcaattcgccctacgcgcagatcctggtatttcgtcgggtcatcatcataagtccgaatgtcgacgccctgtacgttctggcgcagccactcttcgtagttggtccccaggccgacgccaactttcttacctttcaggtcggctgcggttttaatcacgccttcgttaccttttttcaccagcgcctggatcccggaaacggtgtacggcgtcgagaagtcatatttttgcttacgctgatcggaaatagtgacctggtttatcaccacatcgatacgtttagagtccagcgaagccagcatgccgtcccatttcgtgggtttaaggtcagccttcacgcccagatgtttcgccagttcattagcaaaatccacctcgaagccggtcagcttaccgtcatctccctgatagctgaatggcggatatgtcccttccagacccacgcgtagcgtgccgcgttctttaacctgattaagcagattttcagcagcaaaagtttttacgctgacgccggtcattaatacgacggccattgcgcccatcagcgcctgacgacccagaagtgctaatttcatagatacccctaacagagtgatattttgctgtagtgtaaggcgtttaaccttagtcaccaacatcgatacgctacatcttattccaaattattatatatgatgccttttagggcatagtgaaaacgtatcgaaaacatctccattttgctggatatctctcatacttcaatggtcagcttgatgacgtatggagcatggaagatgaaaaaccccacgttactgcagtgctttcactggtactaccccaccggcggcgaattatggcgtgaagtcgaagccctggcgccaaacctcaacgaaatcggcattaacatgatttggttgcctcctgcctacaaaggcgcctccggcggctactctgtcggttatgattgctacgatctgtttgacctcggcgaattcgaccagaaggggtctgtcgccacgaaatatggcgataaaacccagctactggccgccatatccgccctgcgccagcacgatatcgccgtactccttgacgtcgtggtcaaccataaaatgggcgcggatgaaaaagagccggtacgtattcagcgtgttgatcaaaacgaccgcacgcaaatcgccgaggagattgtggaatgtgaagcctggacgcgctacaccttcccggtacgcgccggcaaatactctgaattcatctgggattataagtgctttagcggcatcgaccatattgagaatcctgatgaagatggcgtgtttaaaatcgtcaacgactataccggcgaaggatggaacgatcaggttgatgatgaaatgggtaacttcgactacctgatgggtgaaaatatcgattttcgcaatcgagcggtgacagaggagattaagtactgggcccgctgggtgatggaacaaaccggctgcgatggcttccgcctcgatgcggttaaacatatccccgcctggttttataaagagtggatcgaccacgtccaggaggtggcgacaaagccgctgtttattgtggcggaatactggtcgcatgaagtcgataagctccagcagtatatcgacatggttgacggtaagacgatgctctttgacgcgccgctgcagatgaaattccatgaagcctcgcggcagggacgcgactatgacatgagccagatttttagcggtacgctggtggaagccgacccgttccacgccgtaaccctggtgaccaaccatgatacccaaccgctgcaggcgctggaggcgccggttgaggcctggttcaaaccgctggcttatgcgctcattttgttacgtgaaaacggcgttccgtccgtcttttatgccgacctgttcggcgccagctacgaagataccggcgacgacggcgagacctacgccgttgagatgccggttatcgagcagttacacgaactgatcgatgcccgtcagcgttttgctcacggcgtacaaacgctgtggttcgatcatccgaactgtatcgctttcagccgcagcggcaccgaggaggatccgggctgcgtggtggtgctttccaacggtgacgacggagaaaaaacgcttcctctgggggaaaactaccgtaataaacgctggcgcgattttctcggcaaccgcgaggaagtgattgaaactgacgatgaaggaaacggggtttttacctgtaacggcggcagcgtcagcgtctgggttatcgaagaggtgctataaaatacagagaaacgccgcgggctgagaagggtttcagcccgcaaaaagcttattgcccgcttttatcagccgaggcctttttccatgcctgttcacactccggggtaagacgatccacccgcttgagcgtcatccggtcgtagctcagggtatcgccttcgcgctcaatcggataaacatccaacgcggaggtgacgttataaaccgcatcatcacgcttcattattttacccggcaggacgataacccgctgccactggcgacagtcaagggtattgccctctttggtgacgatcaggctcgcaatcgcatccgggctcatcatttcactctgcgggccggccgattgccagtatccttccagcccagccggcgctggcgctttaaccacctcgctgtagctatcaacctgaacacacccggccagagccagcagagcgccagcaaacactatctttttcatcatccatcccacaaaccgataaaaaaacattgtggcattaaagcgttaagctcgccacccttcgcgattcggcaacagcgcagcagggcgaacgtcgggctcacccaatatggtaaaaaatagccttcgaatgttaagttattctaacccatcgaataaaacccataaatcagcagatgttattttaaccattcaatataaggataatcctattttaaaaagccgctaaaatggcaaacttatatatgacgggtatttattgtttttatttcctccacatagcgatttgtagcctttactttgagaatattcctggcaaattatggggcttattacggaatagttcaggctgcctaatggttccgcggcagcagtcgttttttattgctaacaaaatggacttcatcgcgcttgtcagcgaggaataaattatcgttacgtgttgattgaggatgggtcatgtcaacgattatcatggatttgtgcagcttcacccggctgggattaaccgggtacctgacgggcagaggggtaaggaagcgcgatatcactgaagtacacagtgcgcagagcctgaaggctctctgcgagactagccgcccgacggtggtatttatcaacgaagactgctttattcatcatgaagagagcaaccagcttatccggcaaatcattagccagtatcctgcgacgctatttgttatctttatgtcgctggcgaatatacatttcgatcactacctgctggtgcgcaaaaacttacttatctgctctaaatcactaaccgaaaaagacctggacgacatccttgccatccgcctgaaatatgagaactatcgtcccacccggattaatatccccacgctgtccttaagccagaccgaatcaaatatgctgcagatgtggatggccgggcacggaacctcgcacatatcagcgcagatgaacattaaggccaaaaccgtctcatcgcataagggcaatattaaaaagaaaattcatacccacaacaaacaggtgatttatcatatcgtacgactggctgaaaacatcacctccggaattcacgtcaacctgcgttgaaagacgctggcggccgctgccgccagttcacttgaggcaaatcactcgtcccgctcaacgaaaataccgtcgggatgaccgttctcattaaaaaaccagatcccgagcgggtaatcttccagcgaaaccagatacattacgccttcgctaaacgactctatcgccagtacaacacccgatcgacgtgggccaccatcggtcttcaccgtgacacgatcgtttacctgcataactcatctcctctatttttgagccagtgtagaacaaaactgccgatcgcgcagtgtcctgcccggtaactgctgtttttgtagaccgactatacttaaatagccctgtctgagttaagcgaggtacccgcaatgaaaaccgccaaagaaaatcaaggcgcaggaagcgtagacgttgacgccctgctggcggcgattaatgaaatcagcgaaagtgaagttcagcgtacgcaagacgatccccaccacgtcagtattgatggccggggttaccacacctggcgcgagctggctgaggcctttgagctcgatatccatgatttcagcatcacggaagccaaccgctgaattctgagcgaaaaaaatcccgactcgcaggagtcgggatgaagcttgctaatgcaagaagcacttgaaaattcgttacaccaggatatccgatgcgctacaaacattaccctcaattattttgcatgacaacaaacattcatgaagcaaattattgaaaaacgtggcttagcttccccttcacgctggcaacgctcgccaggcaaggactgcggacatttgttcttccacgaacgtccgatcgccgccaaacgttttttaagaataatctcactaaaataaccgtagtgaatgatttcaattcaatttatttacatcaggaattaattttacccttcggcgcagacccgatcgcgtccgttttgcttggccagatacaggcgatgatcggcaacagactgcaaattttcaaagttatactcacccgaatcctcgctacagctcaccccaaacgaagcggtaatacgcaaagacatgctgttacccagcaaaatttcgcggctattgatccggatacggatccgttcagcaatcgccttcgcttcttttaacgcggtattcggcagcacaatacaaaactcctccccgccaactctccccgcaagatcgccttgccgaatatggctggcgatagtactggccaccagcgacagcacgcgatcgcccgcgtgatggccgtacaggtcgttaacgcttttgaaataatccagatcgagctgaatcaccgcaacgggccgctttaaacgctcgctcaggcgagtttctgcagtggcgcgttcaaacagcgcgccgcggtttaataggcgggttaacgcatcgtgccaggcctgccactccagggaggtctgcagcacgctcatattgcgcaccattcggcggatcaccagccaggagatcatcaacatcagcgtgaacatgagccacatcagcattaaagcaatggtgatgctgccaaagtcaccgcggacgccttcccggatcgtatggatacggatcagtaccccatcaaaattacgtaagttttcccagctgatataacgcgtgaccaggcgaatccccccctgattctcatgagaagacgcgcggctcagcatctcctgttcccgcggcgacagcagcgtcagtacgttgcccggcgcggaagaggcaatcaaattgagctgattatcgtaaagctggtactcgccctcttcgcccgttttaatcgcattgaccagaaacgttttcatctcttgtaccgagaaatccattgccagtacgccgagccaatagcgctggaaatcaagcggaatagacgccgtcaccacctgcatttcgcgctgcgacgcctcatcgggaaaggtttgccacacgatgccgcgagcaggattattcctctgcgtttgccgggtaaaccagggggcgcttgtcgcccgcgaatacagcgccagcgcctgtgtcgcattcttcagcggctcggtggtggtaaaaaagccattgcgcgacacgtacagcatgcgtttcgcaaaaccacggttgttattagccagacgcagcatatagcccagctcaagggtggccatgagctcattgccggaaaaggaattatcgcgagagagaagcgcgtcgccgtcgacaaatgcatcggcaacgccatagaccggcagcgtccgccggttatgaatctcaacggaccagaggggatcatgccgcttttttaaataatcctcttccgccttgcgcaatacgacaaaatccagcggcgttcccagcgccgattgcatcccgttacgaaaaaaaatcattctgtcgatattaaactgcagcaggctgtcgaactcatgggaaacgttttcaagattattgcgctggtttgcgacgtaggcttcttccaggaccttgatctcacgccatatcaacaacgtggaaaagcagaagacgataaaaaaacagaggttaaccacatatccggggcttaaaatctggcgcaattttttcacccacatcagcttatccatcgttttctcgcagcacggttaaagaagcaaacgtcatccacgctccctgttcgtaaaacaaccattaatatgaaagcgcccgacgaatgccgggcgctgataacgggtcaggagcggttcagcttccctccccctccgcgaataagttcatcttcacgaaacgcctcgcgcttaacgccgtaaccgtcataccagcgacattcaaccatgccgttggcgaacccggtaacgaccattcgggggccaccgcttttacgcctgacttcatcactgaccaacaagaccatttttgcctccggtatcaggaagaaacagatttaacatagacgaagctgaaccactttgcatgaccaggagcacatttactttgccggacgacgcagagcggcaatcgctttcactccagccagcacgatggcgccaatgatgaatcccagcaccaggttggcgcccgtgggcagcagcgaggcaatgaccccgttctgcccatgggccagattttcaatagtgtggtgcagtggcgcaataccgtggactacaataccgccgcccaccaggaacatcgccagagtgccaacaatggacaacactttcatcagacggggcgcgatcgccaacaacgccttgcctgtccactgcgccagcgagctggttttctccaccagccagtagcccatatcatccagcttgacgatgatccccaccagaccgtagacccccaccgtcaccagaagcgcgatgccggataaaatcaggatctgattcaacaacggcgcttccgccacaatcccaagcgtgatggcgacaatttcagccgacaaaataaaatcggtgcgtatcgcccctttcactttatcccgttcaaaagccatagggtcctggttcgccagggcctcaagccgccgctggcgaacctgcggatcctccttgtgtttgcgcgcctgcaggctgtgcagcaccttctcgacgccttcaaagcacagaaacgcgccccccagcatcagcagcggcgtaatcgcccacggaataaaagcgctgatcaacaacgccagcggcaccaggatgactttattgatcaatgagcctttggctacgccccagactaccggcagttcgcggttggcccgcacgccggtgacctgttgagcattaagcgagagatcgtctcccaatacgcctgccgttttttttgctgccagtttccccatgaccgaaatatcatcgagtaacgtggcaatatcatccaataaggttaatagactacttcccgccaaaattgcattccttcatttatgattgttcctcctgaagtatgaagcaaaagcgctttttcgcccaccggtgtccatagtcaacaaaaatttaaccatagcaggcgaattaaagcgctcgccagcacgatagttttcacgtttactatacgtcccctttctatctctgcaccgtcgtgaggaagtatgtctacccgtcagctgttaccgctcatcggggcgctgtttgcgctgtatatcatctggggttccacctatttcgctatcgccgtcggcgtcgccagctggcctccgctgatgatggctggcgtgcgttttctttccgcgggcgcggtgctgaccgcctggctgctggcaaccggtcataagctgcctgcgcgaaagccgctgcttaacgcggcgctgattggtgtgctgctgctggcggtaggtaatggctttgtgacgctcgccgaacatcagcacgtgccttcaggcattgcggcggtcatggtcgcgacggtgccgctgttcaccctgtgttttagccgcttttttggtattgcgacccgtaagcttgagtggttaggtatcgctattggcctcgcggggatcgtactgctcaacagcggcggcaacctgaacggtaatccctggggcgcgctgctgatacttatcggttcaatgagctgggcttttggttccgtctacggctcgcgaatcgagcttccaacggggatgatggcgggcgccattgagatgctggcggctggcgtcgtgctgatgattgcctccacgctaaccggagaaaaattaacccagatgccgtcgtggtccggtatttttgccgtcgcctatctggctatcttcggttcgcttatcgccattaacgcgtatatgtatttgattcgtaacgtaacaccggcggtagcgaccagctatgcctacgtaaacccggtggtcgccgtactgctgggaaccggttttgccggagaaagcttatctgccgtagagtggctggcgctcgggatcatcatcttcgcggtcgttctggtgacgctcggcaaatacctgctcccggcgcgtcgtgaaattacatcctgtagggcggagaagtaacgtccagcaaacctatgccctgagtatcgatctgcgcgcactgaccgccgccgcagatccactcttccagccgttcgcccagcgcgtcgtcattgagtttctttcgcccgcgcagcgcgcactcccagactaccagcacccgccatccctgctccgccagtcgcccgatatcccggcgatcgcgcgccacgtttttggctattttatccagccagaacgcggttcttgtggcgggaaccttgaacagatagcaatcatgatgatgccagaagcagccgtgggtaaagataacgcactgatagtccgccacgacaaaatccgggcggccgggcagcgcggcatcctgtacggtaaaagagaatccggcccccgccagtagcccagccagccgtttctctattgccgtatcgcgggtgcctatcgcgcgcatgtttttactgcgggtggctttatcgtgaacgtcggccatggttaatctcttgctcacgcctggcaaccgcttgtgcaatacgcggcgccagcagcttcgccaccgccgcaaataccggcacgacgacggaattgccaaactggcgataggcctgggtatccgagaccggaatacggaagcgatatccctgcggcgtctcaaaccccataagcctcgcgcactcgcggggcgtcagcctgcgcggacgacgaagctggttttcagggtcatcaaaatgcttttcgcccagaggccgatcccagccccggtcaatgaggatttccgcgccatctttgtaatagcgggcagagagcgttcgcgccacgctgtgcggattcgttgggtcgacgagcccgtagccaaaaccgttcccccgctcctggtgcttacgcgcgtagcgatagagatacttccacagcaccctggtgagaataaatttgtcgtcaaccgcgggctccagcagctcgccaaaggtcggccgacgagtgggataaagagtggcgatatcgcgcagggtaaatccctcatgcagctggagatcgcgccggaaacccaccagcacaatacgctcccggtgctggggtaaaaaataacgcccgtcgatgactttagggtcatccgccccggtatgcgccgcgtcggcaacctcgtaccccagctcatccagcgtctgcataatgatacgaaacgtccgcccccgatcgtgactcttcaggtttttgacgttctccagaacaaaaatcggcggctgacgggcggcgataatcctgaccacgtcaaaaaacagcgttccctgcgtttcgcaggcaaagccgtgagcgcgaccaagggcattcttcttcgacacgccggcgagagaaaacggctggcaggggaagccggccagtaaaacgtcatgctgcgggatagtctggcgtatatgctgcgcggcttcttcctcgctcacctcagggagatggctcaaagtcacatcgcggatatcttcattgaaacgatgctgctcaggatcgcagtaccagttggctttataggtgcgcaccgcatgtttattccattcgctggtaaacacgcattgcccgccaatcgcttcaaaaccgtggcgaataccgccgataccggcaaacagatcgacgaagcggaacccataatgcggatgatgcaccggcggctccggcaggagcgtgcgcaggtgggcctgctcctggcgggtgatacgacctgccgcgcgcgctaccgtcgcaacgcgcttgaggatagccgggctccagtgctgctcgccgacggcaattaactgcgcgaccaccgttttgacatcgtatatcgccattagctgacgcaatagcgcctgcgcgtcttctccggtatgttcaaccttcaaagacgggggattttccttggataaattttgcgccataacctcaaccagcccgactatttttgcagaggttaccataaatagcgcggccagttttatgctagtggatcaaagcgctgcaaaacctcagcatcaagcgccatcggctctccgcgaagctctgcgctcagcttggccataaactgcaccagaaaacgcgcattgtgcaccgccattgccctgcccttttctgtctgcatcgttttcggtaaacgcagcagcttgcactggaagtgatccagcgcatacgttttgtcatccaattcccgccggtcagcaaagggatcgcgggcatcaaacaagctattgttcagcgcgccggacaccgcaaatacgcgcgccagccctatagcccccagcgcctcaaggcgatcggcatcctggacgattttcgcttcttcgctttgcggagcaatcgccgcgctaaaactgtgggcttcaatcgcgtgtaaaaccgccgcgtagcgttccggggggaaatcaggaaaagcggactgaaggatagccagcgttttttccgccgccatcgcagaagaacggcttcgctcaggatggtttttcgccaggctgacaatgtcatgaaagtagcaggcagtgaggatcaccaggcggtcggcagcggtctcttcggccaactgctgcgcggtagcccatacccggcggaagtgtgaaatatcgtgagcagcatcctcttgcccgtgatgttggcttagccaggcttcaaatcgttgctgccagtgataaaggtccatgcgcgttcctttgatataaggccagcaacgagcatagcaattttaatcgtgatgttcatacatctgcggattaggacgcgtgtaccaggcgatcgccccgagaagggtcccgacaatacccaacacaaggaaacccagcagcgcgccaatccattttcctgccgttgagccgagctcgccgtcaatcgtggcgccgggcacgctttcaatcttccccacaacccaccagtaacgcgccatcgcccacaggaaatagccgcaaaaggcgtaaaatgcccacagcgccagtttcccgccaggacttcttttcgctttatcttccattcatttgttctccatctacttcacaacccctatcacccaccggtaaaaatgtgatatcggtcacattatatagcgaaaacgcctgcaaaacagcagatccctctctcacgggttcgattttgcgccctggtcgggagcacgaccctatcgcccgctacatatagtcaatgaattcatttcgtttttaaataatacaaattaatgaatataactgaatttctgagactatatttacccccaccctccctgcctcaaatatcatatttgcttgctcgctcttcgctttatccttacaaaaaagcggcggcaatcagatattgagaaataaacatataatatataaatacaatctaacaatacatagagcacatgaagcttatggacaacaaaaatcatacaaaaccaatcataactcaatgttattaaaagacataaatacaataaataaattttcaaacatcaatacaatttaaatataatgaatagaacggaaacattttgtaatattagatataatttacttacatttttaatttaaagaaaaatgaacttcgtcgttagtatttaatagtcaccccggaaggaatgacacaattcatattaattataatcaaaagggaatgtataatgaaaagaaaagtactggcaattctggttccagctttattagttgctggcgcggctaatgcagcagaaatctataataagaacggcaacaaactggatttctacggcaaaatggttggcgaacacatcatgacccatgatggcggcaacaacaactctgacgatacctcctatgcgcgtttcggcgtcaaaggcgagacccagattagcactgaactgaccggctatggccagtttgaatacaacatcaaagcggacaaaccggaaggtcagcagggcagcgctactcgtttagcattcgccggtctgaaattcagcgactacggttcattcgattatggtcgtaactacggcgtggtttatgacgcggcgggttacactgatatgctcgttgagtggggtggtgacggtctggtttacaccgataacttcatgaccggccgtaccaacggcgtagcaacctaccgtaacaccgacttcttcggcatggtggatggcctgaactttgctctgcagtatcagggtaaaaacaacgataccaccgcgaaaaaatcaaacggcgacggttttggtttctccgttaactacaactttgacggcttcggtttcgttggcgcctacagcaactctgaccgtactgatgaacaagctgcggaccgcagaggcgaaaaagctgaagtctggaacctggcggctaaatacgatgcaaatagtctgtatgcatcagtcatgtacggtgaatcccgtaacatgactccgctggagaaaacgacttttggcagctttgccaatcacacccagaacatcgaagccgttgttcagtatcagtttgattttggcctgcgtccatccctgggctatgtctacgcgaaaggtaaagacctgggcgccaaagaagacactaatgcggatatcatgaactacgttgaattgggtgcatggtactatttcaacaaaaacttcaacgtttacaccgcatacaaattcaatctgatcgatgatgaagacgcggcggtaagtggcgcagccaccgacgatcagttcgccgtgggtatcacctaccagttctaagactgcctggttaatctaaagcccgcctcgtgcgggttttttcgtttttaccaacggctcctcgtcctgcatcgcgaatatcgctacacggcagaaagatgaggcgttgcgatctattaacgattgctccgcagtaaatcaggaagatgataattgtagccccttcgaggcgtgatatcctttttgacgggagacgttggaagaaaattacgtcatcatgcaaatgatataattaacaataaaaacaaaaaactcacaatattttcactccccgccctcagccctatccgggagatttaaactgttttttcttcttgagcgcagcaacgtccgcgcataaataccgtaacagtagacaagttaataccgcagctctgcctggtatgaccgcaccagagctcacgcctccgattgctttccggcttttatatcgccgccattcggcattatcatatccatacaagctcggccagagaaacgtaaaacaatacccgccgaggaatatgtctacggtaataaaaacccgggttgacaccgaccacgagttggcgtcaaatacttatatttcaggggctcattgcttatatcgaccgtgcattcagtctcttaaccgcccctttacaaaattgatgtaaatcaacaaatgattaattacaccttgaaaaaaaatatatccagagaagcggtcaggtacattatcgttggcctggcaaatacagccattacggcagttgttatatttggcctgatgcatgtcggcgtgggagtctacccttcaaatgcaacaggttatgtcgctggcattattttcagttttgttatgaatgcgaagttcactttctcaacgacattgagtcccctgagatttatcaaattcgtatccacatgcgctttttgttacattttaaatttaatagcaatgaaagtttttttcattgtcatacctaatgctatttatacagcgcaagttgtaggcatggtgatttacacaacagctggttttattctaaacaaatactggtcaatgaaatgaaagaaattaatataaaccacacgaggagcaaaataccttcgttagcaatcgttgttccttgttataatgaaaaagaggcctttccatactgcctggaggggcttaccacggtattacaaaacctccttgcaaaagaaaaaatcgctcgaaatagttatatcctctttgtcgatgatggcagtaaagacaacacctgggaacaaattaaatccacatcacaggaaaagtcattcgtccgcggtctgaaattatcaaggaaccggggccatcagatcgccctgctggcggggttggcaaacgcggatacggacgttaccgtaagtattgatgcagacttacaggatgatataggttgcattgagaaaatgatcgacaaatatcatgaggggtttgagattgtttatggcgtacgcgacaacaggagtagtgactcagtattcaaaagggcaacagccaataaattttattctctgatgtcagggctgggtgtcaatcaggttcctaaccatgcggacttccggcttcttagccgtacagcgttgacagcattaaaagattttaaagaacaaaatttatatttaagggggctaattccgctgttgggttataagtccagcagcgtttattatagcagagatgaaagggttgcaggcgaatcaaaataccccttaaaaaagatggtagcactggcgttagaaggaataacgtctctgacaattaccccattacgtatgatcgccgccgctggggttgccacatgccttctatcttcactagctgcaatctatgccttcattgagaagctcctgggaaataccgttgcgggttggacatctgtaatgattgcgattttcttccttggcggtgtccagatgctttctttggggataattggcgaatacgttgggaaaatatatatggaatccaaaaatcggcccaaatattttatcgaagaggtagcaaaacacgaaatgagaggcgagcaatgaacactgaggacgaacggatgacgtcttacactaaaaaaattattgcaatgctttacctcgcggcaattttcttagtttatagcccaacgattatatttagttacgcattttcagatgactggtcgacactttccgatgttttttcagggaagggttctccgtttcaatgggatatgcaatccggcagacccttgtatgccgttgccagacgacttgcctttacgctagttcacaatctcgatgaccttgcctatcttagattttttaccgtaatatcggcatttgttttttgctttttccttttttcatttatagaaaaaagaaacatattcgagcgtaagataacaacaatcgcattccctttactaatatgcctgacgcccgcagtacaggtttataattcctgggcgacatgtttcccttttgtactctccatactccttgccggaataagttatgcgacattaaaacccatcaataagaaaacgacaattataagatttgcagcatccgtcattattttatggtttgcctttgccatatatcaaccaacggcgatggcatttttatttttcgtcatgcttgataactgtctgaaaaaagacaaaccattttccatcaacattgttctaatcagtggcgcagttttatttatcggcatgcttggtagcctgctgttttcaaaatttgtacctgtatggttatatggcagctcaattgcacgtgccgagttaactaataatacacttgagaaattacgatggtttataaaagaaccgttgattaacgctatcaacaactttaatataactccaggcacctttttcacaacgctctcattaataatttgcgcaataggtttactttcaataataaaaggcaaatcaggcccgattaaggttctcatgtttattatcatggggattggcgcctactctccaaacttattagtcaaggaaaactgggctgcatataggtcactgatagcactggaattcttcacatgcgctcttattattattgggttagatgccttgacaagcaaactcaacatagcaaaaaaagcgctacccatattgacggtattcgcgatgatcgctgcatcatacaatatctttaatggtttcattatcccacaaaaatcggagttaaacgcattagccagcgcgctttcctacaaggtggggaaaacatttacaggggatgttctttttgacattcaagatcctgcctataacgcctttactaaaacacaacgttatgacgagtttggcaatatttcccttgcggctccctgggctatcaaggggatggcggagcaaatcttaattagcaagtcaatgcatttcaggcttcccgataatgttattctgacggcaaaggagcaatgcgccactgattgcatcattataaaaacgggcgatgcgatgaggagttcaacctccaactactgaaacttttcgccaccacgcatacctgtatatgatcccgcgccagatccgcgcgggatagtttttatcccggcagctcgggcctgggtcataagtctctctatcacctcacagcgctcgacagtcaaccatgcttccagtgcttttctgagttcgcttcttttcatccatcatcccttctcttgaggatatccttacagaatccgagtgtagcaagggcagttaactgctttgttatctgtgatacaagacgggctaagctattgtaaagagtgtgagcttgtgaactaaagaggataaaagtggatgccccgcaagaggcaacatggtaaaaaagacagcgttagaggcgagaaaacagagcgatagaaagaaattttaatgcagggattcgtgcagggcaaaatcaaaagcgctttgcgactgactgattttgttgaatagtggcggagagagggggatttgaacccccggtagagttgcccctactccggttttcgagaccggtccgttcagccgctccggcatctctccgctgttgaggttgctataatgccaggttctttggcattttaatagttcctgtctctttaattcagttcaagtgacgactttgcgagcaatatgatgtttaaatggccctggaaagtagatgaagagtccggcaacgcggaaatcccctgggaaaaggcgcttgccatccctgtattagccaacctctccgaccatgagcagcagcagctggcgcaaatggcatcccgctttttgcaacagaagcgtctggttgcattacaggggctggagctcactcccctacagagcgctcgtatcgcgctcctgttttgcctgccggttctcgaactgggcatcgagtggttagatggttttcacgaagtgcttatctaccctgcccccttcgttgtcgacgacgaatgggaagatgatatcggcctggtgcatagccagcgaatcgtgcaatcagggcaaagctggcagcaagggcccattgttctaaactggctggacattcaggactccttcgacgcttccggtttcaatctgattattcatgaagtggcgcataagctggatacccgcaatggcgatcgcgcgagcggcgtgccgtttatccccctgcgcgaggtggctggctgggaacacgatctccatgctgccatgaacaatattcaggatgagattgatctggtcggtgaaagcgccgccagtattgacgcctacgcggccaccgatcctggcgaatgtttcgccgtactctctgagtacttctttagcgcgccagagctgttcgccccgcgttttcccgcgctttggcagcgtttttgcctgttctatcgccaggatccgctggagagattacgtgagaataccccaccggatgacggcaatagcccggcagtacactaaaacaacgacctgcactaaatttagccatttgaatcagcaagttaaatttaatgttgacacaaaaatccgagaccagtagtattcgccccgttcacacaattcctctgtagttcagtcggtagaacggcggactgttaatccgtatgtcactggttcgagtccagtcagaggagccaaatttgaaaagcctgcttttgaagcgggcttttttattttcattttctcctccacatcggaagaattttgaggtcaagcggattcgaggacggcgtgcccccaatgtcccttaacgcctcaaaatcagaaagttagtaccatccgaaaaacgcttctaatagcatcctgccgccacgcacttatcctggtcaaacgcgcgtcatggcttcatcacgatccggccaagcggtttcgctgtctccgcaaattcgtgggccgcggcagcgttagccagggggaagatgcgatcaatgacaaccgtgacgcgccctgctgctacagcctgcagcatctcgtccacgcttgttcgaactccatgtcttgcaaaaagaggtcccatgaatacccccatgagcgtctggttagactgcattgccggccataagtcgacagtcagactgccgccaccggcattaccgacgaagaccagacgtccttccggagcgagtgcagaaagcgaaacaggcaacgtcgttcccaccggatcgatgacgagatcaacaccggtgccatgggtgtactgtcggacactgtccacgatgttatcctttgtacgatccacaacatgatcggcaccaagttcacgcaaccgacctcgtcgctgcgttccgcttaccacggcgatgaccgttgcgcctgcttgtgaggcaagctgaacggccgcgagccccacgccacctgctgcggcctgaataagaacggtttctccctgccggagcatgcctcgcgtgaaaaggcaatgatgcgcggtaccaaatgaaatcggcaatgccgccgcttctgccattcccaccccatcgggtataagccaggtgcgttccgcgggcacggcccaacgttccgcatgcgatccctgcatgtgaaaagcagcgactctgtccccaaccgtacggcttcggactttcgatccgacggcaacaactgtgcccgcggccgcgtagccaccgatccataaaggaagcggcggcggcgttgaacggcggttaatcagatcgccaccctcaatcgagatagcctcgacagaaatcaggatgtcgtcgggccctgtgaccggctccgggacatcgacatatttcaggacgccgggagcgccttccacgtcatagaccgctgctttcataaattttcctctgtcttatctttcgactggcggaaaaacccgtcacgcgcagggcagcctggcaatcaccttaatctcaaactggaatccgtaaagccacgtcacgccgatcccggtcaacgtagggtaaggcgcttccccccaatattctggcaggatactccagatagcgtcgagatttgactcggggtcgacaacaaagagggtcacgtcaaccacgtcaccgaacgtgcagcccgcagccgcgaggacagcattaaggttatcgaaggccaacctgacctgcgctttcagttcgggctctggcgaaccatcctcgcggctaccaacctgcccggaagcgaacagaaaaccgttggatttgatggccggtgaatagcgattgcgctcatagagcgcctgccgaccggtggggaaaactgcatcgcgtgccgtcatgtttgtacctctgcaatggggcgaaatcagcccggtgaacataaggacactttacaagtgcaggatcgggcggataaacaagcgactttgtccatcattgtttgtaatatccaaacaatcggcgaaaagggaggattaggaatggatcgtttcgatgcgatgcgcgcctttgctcgcgtggtggaagcagggagcttcacaaaggctgcccaaacgcttcatatgagtaaaaccacggtgacgcagctcattcagcagctggaagcgcgcctgcgcgtcaagttgctccatcgcaccacccgcaggctcggcgtgactgccgatggcgcggtctactacgagcgcgtcatccgcctgctggcggacatggaggatgctgaaaacagcctgtccagtgcggcgatgacgcccaggggacggctacgggtggatgtgcccagtccgctggcccgcctcgtcctgataccggcgctaccggctttccacgcgcgctaccctgacatccagttcgacatgggcgtcagcgaccgggtggtggacctgatcggcgacaacgtggattgcgtcctgcgcggtggcgacattaacgaccagtccctgatcgcgcgccatgtcggcgatttgcaaatcggcgtctacgccgcccctggctatgcggaacgccttggcgcccctgcgcacccgcgagagctggaaaacaccgaccatcgcatagtgggattcttgtcctcacgcaccggtaagattgatcctctggtcctgcacagtgggagtgaacatattgaaatcacaggccgctatgtacttgccgtggatgatggcaacgcttacctcgaagcggggctcgctggcttaggcgtgattgcgctgccaacctatatggcggcaaaacatcgggccagtggcgctttaattccgttatttgaacaatggcgtatcagtccaatgccattgtacctggcgtttccgccgaaccgccatgtcaacgccaaactgcgtgtttttattgattggatcgttgaattgatgcagcagcatgttcccaattccaacaataagtaacgccatcccggtctgaggatccctgtttaagaaacccggcagccatcgcgcagccgggatcaccccctgcggtgccagcgcagcgcgtcgaccaccagcgtaaacgccgccggaagatgctgtcggcccgggtagtaaagatagtatcccgggaaatgagggcaccagtcggcaagtagcggtaccagttcccccgtagcgatatatttcgccgctaagtcatgaggaacataggcaatccctgctccgtccagcgcggcctgaatcatcagaaaggtattgttgaaaacggtttgcccgtcaacgcgaacgctggtcttttgacttcccttttcaaactcccaggcgtaaagcgcgccgtgggtgggcaaacgcaaattaacgcagttatgcgccatcagatcctcaggacgtcttactgccgccctgccggcaagataagcgggggcggcaaccaccgccatctgcacatcgggcgtgatgcgcaccgcaatcatgtccttatccacctgatcgcccatccgtacgcctgcatcaaaacgctgggcggcaatgtcggtcagctcgtatccgacgctgaactcaatatgaatatccgggtattgcgttaataaaggccgcagacgcggccacaggacggtgacgatggcatgatcgttggcggtaatgcgtaccgttccggcgggtttatctcgtgaagcgcgcagagaagccagttcagcttcgatttcattcagccgcggcgccagaacggccagcagacggttcccggcatcggttggcgagacgctgcgcgtggtgcggattaacagccttaccccgagacgcgcttccagagccagcagcgtatggctcagcgctgaccgggaaacacccagaatcgcggccgcccgggtaaagctgcgctcgtgagccaccgtggcaaaagcctgcaggtcgttgagtttttctttgctcatcattggtgaattttgtgcaccagtgtattcatatttgcgcatcttatcatttaatcaaaccttctctacactttgttcaacgagtcgtaaggggccgcttaaaagcccaaaactgaaatgtggagacatcatgaaccaacaatttgacggtaacggtatcttccctaagggggagaaaaacgaggcctatgcgcagtattttcagggtaccagctacctgaatatgctctccacggaaggggtcactatcggcaacgtggtcttcgagcccggctgccgtaaccactggcatatccaccataaaggcgggcaaattttactggtgaccggcggtcgcggctggtatcaggagtggaatcaaccggcgcgcgagcttaccgctggggacgtcgtgaatattcccgcaggcgtcaagcactggcacggcgcggccgccgatagctggtttgcccatatcgccgttgccgtccctgccgaaggtgcgtctaacgaatggctggagccggtcgccgacgacgcctatcgtcagctgccttaaacatcgaaacagcagggctcgccagttaatgcgccctgctctcattcggcggtatgcgaaaatgcatcttcgactaattgcccgagccccggggaaaaccgctcatcgccagcagcgcgctttgcagcgaggcgctaaacatctccccgtgagacagtccgggatagggccaccagttgaccgccacgccatttttcttgagcagggaaaccgtctgcagaacgttgctccggatctcttctgcccctgcgaaagaggcccgctgggtcgcaaccgccccctccatcaggtacagggacttccggttaaacgcatccgccttcgccgcggccatttttgctaacagcgaggcgttgccccgtcccagagaaggactggcagaaaaatagatttggaagcgggatgacgccagccaggcgtcaatgataaataatccgccataggagtgcccccagatagcccgctgctgagggttgatagcgatcccgcgctcaacttttgccacgatggtattttctaatagctggcgaaatgcctcgctgccgccgctcttccgtcggtcccatccggcgtcggcaggattctcctctactttcggccggtagtcataggctcgggcaggctgatcgaagggcaaattcgtttgatagccgatggccacaataacgggcggcgttttttgcgtaaacgtctcaagcagcgagtcggacaaccggtccatcaccgcgttgccgtccagggcgtacagaatcggatacccctgcgcgggcggcgccgcgttcggtatcgccgtccagaccttataatgccgttcgccatcaagggagtcgaaataagcaacgttgaagtgataatacgcggaaccgcggtcggcgatattcggccccagcgggcgcatatccggcctggcgtaagcgttaatgccataaagcgtggagaccagcgcggcgataaaaatccgccctttcggcggagaagcaaaacaaaacttgcgaagcgacatcggttgattgtttccagcacaccctcggtagtgataatgattgctaatatcaatctcaattgcaagcaacgaggttatcccgggagcggcgcgttgcgcctgcccggggaacccatcatcacatcacgggtagcccggttcgcgctgcgcttagccgggctaccgggaatgccgcgttatgctcaatatcaggccgtacgccatctccgggtcagcggcttctcgacttccacaatcaggaacatcacaaaaccgataataaaggtgataacccagtagcggaacggcagcgcttcggtaccaaacagcatctgcataaacggcgcgtagataatcagcagctgcagcaccagcagcaccccgctgacaatccagatcccccggttcgccagcagccctttactcagcgagaagccgtccgccacccggcagttgagcatatagaaccactgggcggtaaccagcgtctgcagcagcaccgtgcggataaactcaggcgaatagccgcgcggctgtagccaggcttcaagcacaaaggcgctgacggcaatcatcgaaccgacaaaaatcacccgccagatagcaaagccgtccattacgtgcagtttgggatcgcgcggcggacgccgcatgatgttcttctcgcccgcttcgaacgccaggccgaacgacagcgtggcggaggtcgccatgttcatccacaggatcagcaccggcgtcagcggaattaaattccccgccagcagcgcaataatgatcaacagcccctgcgccaggttggtcggcataatgaagagaatggttttcttcaggttgtcgtatacccgacgcccttccctgacggcgctggcgatggtggcgaaattatcgtcggtcagcaccatatccgcggcctctttggtcacttcggtgcccttaatccccatcgcgataccgacatcggcctgcttcagcgccggggcgtcgttcacgccgtcgccggtcatcccgaccacctctttcctgctttgcagcgcctgcaccaggcggaatttatcttccgggctggtacgcgcgaaaatatcgaatttctgcgccgcttcgctgagctgggtatcgtccatcacctccagttctctgccggtgatggcgttttccgcattgccgatccccagcatcttgccgatgctcatcgcggtttgcgggtggtcgccggtgatcatcttcacgcggatcccggcctgcaggcagtcgccgatcgccgtaatcgcctccggtcgcggcggatccatcatcccggcaacccccagcagaatgacgccctgctgcaaatcctcatggctaagctccgtttgcccgtcggctgccggtttccacgccgccgccaccatccgcagcccttcccgcgcgtactcttcgattttcgcttcccagtaaggctgatcgagcggcgccaggccatggtcggtttgctgatgctgacacagacggaacaggacatcgggcgcgccggtaatcaaaatcatctcttcatcgccgatgcggtacagcgtcgacatatatttatactgtgaatcgaaggggattttgctgcgcagctcggtgttgaccgtcgggagcgggactttcgccgccagcaccttcagcgccccttcggtcgggccgccggtaattttccacagcccgctttcgtcttttataagctgactgtcgttacacagatcgatggtgcgcagatagcgttccagcagcgtgccggggacaacggttatcggatcgggctcatcgatcggatgaatattccctaccggttcgtagctgtcgccctccacccgataaacgttatcggcggtaataacggccttcaccgtcatctcgttcatggtcagcgttccggttttatccgagcagatcaccgtcatcgccccgagggtttccactgtgggcagcttgcggataatcgccttctgacgggccatggtttgcacgccgagcgagaggattatcgagataatcgccggtaaaccttccggcaccgacgccaccgcgaggctaatcaacgacagcatcagctcagaaaccggcatatcgcggaacagcaggctgaagacaaacagcgcggccatcatcaccagaatgatgataaaaatggctttgccgagcttatccatttgcaccagcagcggcgtacggtgtttttcgatatccgacatcatctggttaatatggcccagctcggtatcgccgccggtggcgaccaccaggccttttccgccgcccgaactcaccgtggtgccggaaaacagcagattggtacgatcgcctagcggcagttcgccgctgagcgcctcagtgcttttctccaccaccgtcgattcgccggtcagaatcgcctcttccacccgcaggttatgcgcttcgatcacccgcaggtcggcgggaatgcgatcgcctgcgcggatgacgacgatatcgccggggaccagagcggttgtcgggatcgtttcatggttgccctgacgaataaccaccgcctcgctggagagcatgttgcgaatgctctgaagcgatttttccgcattgctctcctggatatggccgatcagggcgttaatcaccgccacgccgaggatcaccagggtatccacccagtgccccatgaccgccgtcagcagcgccgccgccagcagcacatagataagcacatcgttaaaatgcgccagaaagcgcagccacgccggctttcccgccttttgcggcagcgcattttcgccatactgctgcaaacgcgtcgccgcctcggcgccgctgatgccctccggagtgctgttggtgctggtcagggtttcttctacggagagctgatagaacgggccgcccggtttttctgtattcatagttatctcctcactcctgtaacggaaatcagaacagcctcaggccgcccttaacgcaccacaaaaaccggaacatgggcatagcgaacgattcctgccgcctccgaccccagcagatgcgtctgaatattcgggttacgcgaaccgatgatcaccacatccgctttcagttcatcggccagtttggtcacttcatcgcgaatgttgccgctgcgaatgtgaatctgaatatccttttccgtcagcgcgagtttcttgatcagctctgccagcttttccttagcagtattaatcagatagtcttccatttttcgtgcatcggaaataaaaccgcgcgtcagcaccggagaaaaagagggaatgatgtgtaccagatgaatctgtcccgaagagctttgcgcaaggaattgggcgtgggacaaggccttgtccgccagaccgatttcaaacacatcaaccggcacgaggatatttttatacatagagacaatccttttattacctataaaaaaaggtggtgaaaacagcccgggcaatggcgctgaggaaaagatctcaagaacaaaatctgcaagacgtgtaggtataattaaacgtagcacaccacgataaacattattaagtcgccaattaatatattgaaaaatatcacagagtcaggcgcagccagacaattcgactacaaacccggtaaaatcgtcgccattgccgtaatttttgctctttttaacatttccgttttactacgactatcctcattatcagtggcttgttcgctttctgtcgccccacaataattattacgataagaatttacttagctaagcgttagcgctaaaggaggaacgatgttcggttacagtctgtttcgcctgagcctgtttattgccctggcaataatcgcctgtacggctaccgggttaattacctatttcgttgtctcggccctcgctgaataaatacagcgattgtgaataatatgtaaaacatagccttttacttcgaggggaatacagtgaaccgttatttttctctcattccgcttgttattttaataacaacggcttgcgatcggaaagcgcctgaaattacgccgttaccgcggatggtcaaagttgccgaggtggtggctatcggtgatgcgcagcagcgcgtatttcccgcccgcattgagtccggggactccaccgatttgtctttcaaacgcggcgggcagattgaatcgcttgatgtgcgtcagggagccgctattactcaggggcaaacccttgcccgcctcagcgcgcgggaagcgcagcagcgggtgaatgagcggcaaaccgctgccaccctcgcccagcggcagttcgatcgcttccagacgctggccgggcgtcaggcgatttcaaaggcggaaatggatatccagcgggccaaccgcgacgccgctaacgccgcgctgaaaatcgcccgcgaagagctgtcgcaaatgacgttgaccgccccgttcagcggcgttgccgcttacgtcccggtacgtaaccatcaggttgtcgccgccggacagcccattgtgaccctgacgcgaaccgatctgctcgacgtggtgtttagcgttccggaaaacctctttaccgcgctggatattcgcaacgcgcagtatcgtcctgtcgtcaaaattaacgccatgccggatcgccagtttaccgccgactacaaagaacacaccggcagcagcgacagcagcacgctcacctggcaaatcatactgactatgccgaggccggccgacttccccgcggtgggcggcgttagcggaacggtgacaatcaacctggcgaacctgcccgccagcgccggtcaaaacgcggtggtggtgccggttgaagcggtgtttaacccggataatcgcccgcgcaatgagccccacgtctgggtggtacagggaagcggcgaccagctcaagctggaagagagaaaagtcggcgtgggcccggtgacctctcagggcgtggtgattaccgaagggctcagcgtcggcgagcgcgtagtggcggcaggcgtcagcgaattacatgcgcaacagccggttcgtatctggacgcgtgaacgaggtttgtaatggatatttcccgccagtttattaacaacccggtccgcgtctggctgaccattttgctgctgggcatcggcgggatcttcgctctgctgaatattggccgcctggaagatccggcgtttaccatcaaaaccgcggtggtggtcacccactatcccggcgcgtcggcgcagcaggtggaagaagaagtcaccctgccgctggaaaacgcgctgcagcagctgccgtatctcgacaacgtcagctcaatttcctccaacggcctgtcgcaaattaccgtcaatatcgcctcgcgctaccactcccgcgagctgccgcaaatctgggatgaactgcgccgccgggtgggcgacgccgcccgccagttccctcccggcgtcgccgctccgtttgtgaacgacgattttggcgatgtctttggcttcttctttgccctctccggcgagagctttaccaaccctgagctggttcgctatgccgagcagctgcgtcgcgaactggtgctggtccccggcgtcggcaaagtcgccatcggcggggcgatcccccagcagatcaacatcgatatctcgctggcgaaaatggccgcccgcggaatcacgctcaaccagctggcggcgatactgagcaggttgaacgtggtgtctaacgccggtgagattaaatccggcagcgaatcgattcgcctgcatcccacgggcgagtttgccaacctcgacgagcttggcgacctgttaatcagcccgcacggctcggcaacggcgacgcggctgcgcgatattgccacgctctcgcgcgggctgagcgaatcgccttccagcatttaccacgccaacggtcgacaggcggtcactatgggggtgtcgtttatacccggggttaacgtgattgacgttggccgcgcgctggaaagcaagctggagcagatgtcggcggaaaaaccggccgggatcaacattgacctgttctacgatcaggcggcggaagtcgcccattcggtcaacggctttatcaccaacttcctgatggcgctggcgattgtggttggcgtgctgctgatctttatgggcgtacgcagcggcattattatcgccctgtcgctggcgctcaacgtgctcggtacgctgttgatcatgtacctgtggggtatcgagctgcagcgtatctcgctgggggcgttgattatcgccctgagcatgctggtcgataacgctatcgtcatcgtcgaaggcgtgctgatcgcccgccagcaggggtcaacgctgctcatggcgattaactacgcgatccgccgttcggcgctgccgctgctgggggccacggtgattgccattctcgcctttgcgccgattggcctgtcgcaggactcgaccggggaatactgtaaatcgctgttccaggtgctgctgatttcgctcatgctgagctggttctcggcgctgaccattaccccggtgctgattaaatggtggctgtttaaaaatcaatcgcagccggtggcgcaggccgacgccaatccgtacggcgggcgcttttaccgtctgtaccagcaggctctgcgtgctcttctgctgcgcaaaaccatcacgctgaccgtcatggcggcgctgctggccgccgctatctggggattcggctcggtgcggcaaaactttttcccctcttcaaacacgcccattttctttgtcgatctctggctaccctacggtaccgatatcgcgaccaccgaaaagatgaccagcgatattgagaccaccattaacggccagccgggcgtggtcaccaccgtggccaccgtcggtcagggcagcatgcggtttatcctcacctacagcgggcaacggcagtatagcaactatgcgcagatcatggtgcgcatggacgaccagcgcagcattgccgccctgacgcagcatgtggatcgctatattgcgcgcaactacccgcaggtgaacgccagcacgaagcgcgtgatgttcggtccctccggcgacagcgccatcgaggtgcggattaaaggtccggaccccgaccgtctgcgcctgctcgccagccaggttggcgatatcctctccgcggacccggccaccgacggcgttcgcaacgactggcaaaaccgtagcaaagttattcgtccgcagtactcccccgcgcttgggcgcgagctgggcgttgataagcaggatattgataacgccctggagatgaacttctccggcagccgcgttggattgtaccgtgagggggccgacctgctgccggtgatagtccgcccgcccgccgccgagcgccaggacgcgaatcacctgaataacgtgctggtctggagccagagccgccagcagtatattccgctcagtaacgtggtcagcggctttcaccttgaatgggaagatccgctgattctgcgccgcgatcgcagccgggtgctgacggtacagaccgatcccgacccgctcagccaccagacgtccggggatatcctgtcccgcgtgaagccgcagattgatgcgctcgctctgccgcacggttacagcattgagtggggtggcgatgcggagaactcgagcgaggcgcagcaggggctgtttactaccctgccgctgggttacctggtgatgtttgtcatcaccgtcctgatgttcagttcgctgaaaaatgcgatcgccatctggctgaccgtgccgctggcgctgattggcgttacgccgggctttttaattaccgggatcccttttggatttatggcgttaatcggtctgctgagcctgagcggaatgctgatccgtaacggcatcgtgctggtagaagagattgaacagcagaaacaggaaaaagcgcagcaggaggcgattattgatgccgccacttcgcgtctgcgccctatcctgctgacggcgtttaccaccgtgctcggcctggcgcctttattactcgacgttttcttccagagcatggcggtcgttatcatgtttggtctgggttttgctactattctgacgctgctggttctgccggtaatctacgcctgtttccacaatcagaatatgaagcgacaaccatgaacagtaccggattaaatattattaaaacgctgggatgcatgacggcggtgaccttcttcaccatttacaacacctgggatagctatgattatgactatcactggatcctcgggtttttgacgtttatttccactatcgccacgccgctgttttttgtggtggcgggctatctggattcacagtctcgccacgactcacaatggcagttgggcaaaatcaaaagcgtggtgatcgtctttctgttctggatgacggtgtactatctctgggagccctaccagcgcggctatcttatccagccgtggtttatatttgcgtttatcgtcatttacacctttcacccggttatcgagtggctcagccaaagacgcacagcgttctttgccgcggtgttcacgctgctgctgctctcgtatggttacgatcttttgtccgcgctgtacccgaatgttcatgcgctgagcctggcgccgcagtaccgcctgtggacctggctgctgttttatctgaccggtcagctcttcagcgacccgctggtcgccgactggctcaggcgagaaaaagtggtcaaaggcgcgatgatcgccattccgtttatttatctttttacctggttttacgagcggcatttctttttcgccctgtttaaggccgacagaaatgcgttcattctgaccggttcacaaatctatattctggtggttgcgctggttattgccgccaacggcgtgcggtttcgcaaaaacagcgagtttaaagagacccttctcgccaccattagcaaaacgatgaccggcgtctatattctccactactccgtttttcacctgctcaccacgtttatcccgattaactcgctggggacaaaattaatgctgattgtccttacgtttatcacttcggtactgatttcgatgctggcgctgtccaattcggtggtcaaaaaagtgattacgatttgacgatcgccggttcagctcatggccgcctgcgcatttaaaaaccgtagcgcagccaggcaaacagtacgttgccgttattataggtgccgggaatataggtgaactgcacgctcagacggcggtagctggcggagaagagcggcaaaataatcggcagaggtacgtagttggcaaagtcatcgcgggcggtgatcccggcggtgacgccaagacccaggcgaaattcacgacggctatcaagataccagcccttttcccagccgtagccgacaatcggctgccactcgttgtgcgaatctttgaacatcatggcgtagagcgaactccagttgccctccgcgttatatctggaaacgccgaaacctcctccccacggcatttcattatagttatccgttttctctttatcgtacataaagcggttgtgccagctgagaaacggcagatataaatcgtagttttgcggctcattccaggtctgcgagacgtcgtttttcaaccagctccaccagccgctgatgcgctgctcgccatagaccttcgtttcagcctgtaccgacaaggcgaaaataaacgctattccccacgctagccgcagacaacgtcgcatcgttttatccttaaagaaagtcgcccggtgttcattcagtttgggaacaaaaaacaggctttgcaaatatcaaccaacaaattttctgcaccgtcccgggctaattgcaagtccagttaaacgcccgtttcaggacagagagcgccgccgcggtgatttcatttccttgctgctgggattatgatggcgctaattattctttctgcccgcagtgattgagaaatagatggacttcatcagcattattatgtcggcggggaaaacctccgtcgatgtggcgctttatacgctgttgccaatcatggtcgtcatgctcatcgtgatgaaatatcttgaggtccgcggggtactggacgccatcgttcgctggctcgccccgctgcttaagccgttcggcttaaccgggatgagcgcttttgccctgattcaaatgaattttgtcagcttcgccgccccgctggcgaccctcgcgattatggataaacgcggcgcttcggaccggcatatggccgccacgctggcgatgcttttcgccatgggtcaaggcaacgttttctacccgttaacgcccttcggcctgcactggctggcctcaatcatcatttcgattgtcggcgggctgtgcgccgccgcggtcacctggcatatcgccggccgcaggctatcgatggttgaaaacgtgcgggccgacgcgctgcctgaggcggagcaaaatagccaggggattatcgccgttatcaacagcgccggtgccgacgccatccgcctggccctcggcgcggtgcccatgctgatcctgtcgctggccatcgtcggatttatgcaggcggcaggcctgattgagatgcttcagcgcctgctgctgccgctgctgctgtggctgaatattccggttaacttcgtgctgccggcgctggtcaaatgcgttgccggcggtacggcctatttcggcgtggtctccgagctcgtccagcagggtaaagcgaccgtaagccagatcaacgcctcggcgggcctgctagtgcaaacgttcgatcttcccggcatcggcatctttctgggcgtcagctcgcgcttcgtacgcctgttccgcttcgccgcgattggcgctatcgccgggatcgccatccgcaccgtgatgcacctcacgctattctgaggccgcctcctgcgaacggagacaggcagcgatatccgcctgctcgctacaggcgatatgatggttaatgcgcgccatcatccacgggaaaaacgggttggacgtgacgcgcatcagcgtatccagcccgacgctcagggttgaggtttccccgcgcaacgagatcgtgccgatgctgatcccgtagcgatttttctccgccggttcgcggccatagagcgagtcggtcagcgggaacggcaccgccacgtgcgatagcgaatacatatcctgcggccaggcgatattcagcggcgtcacggtttcgcttcgcatcccggcaagcgtggtgcgagccaccgtctcgtaggtgtcgggcgcggcgttggtaatcaccgtggtgccgtagggccgaggcgccggcggcaataacgtattcaccgccgaatagagcgagggacgaaatagcgcgcgcaaattcgccgcctggttaatgtcgaaaatcaccagttcgctaccgttatccggcagataacgatagagcgaatccaccaccgcccgggtgctcaccgttgaatccatcaccgactgaaaagttaacaccggcgccagttcagaaagccgctgacgctgcgcttcctgcacgatttgctgctgcagcgcctgcgacaacagccatgactgccttgccgccttcaccgggaacgaattgtatttatagggattaaactccgggacgacgttcagccacgccgcgcgggcgaaagccggaaatacagaaggtaaaccggccagcccggcaaaacgcgcaaacgcggtaacgccaatcatcggcgacagcaggatgacctgctgcggccggcgcagcgacttatcttccaggctatcgagggcgtacttcagcgccagcgccccgccgttggagtagccaaccacgtgcagcggcgcgtcatcccccgccaaccgcgtcgcttcgcgcaccgcaagccgggttgtcgctatccactcttcgcggtccaccgcggtgagcgcgccgggggcggtaccgtgtccaggcagccgcggcgcgacggcaacaaatcccagctgctgatagcgctgcgccagataatgtacgctgtagggcgaatccgtcaggccgtgcagcagcaccgccgcgccgcgcggtttgccctgcggcaggagaataaaggagcggttccagtcgggatgaaacttatccggatagaccagactttgcgcgtaaaagcggttaatggccgttttttcatcgtcgctcagcgtgtcggtaatgctgcttttcatatcgcggaaaatcgccgcttcccgcgtctggtattcggcaaaagtggcgcggtcaatctcgctggcgctcatttcattcgccgtccaggtatgccagcggtgcagcgccggaccgcgctgcgattcgtaaatacggccaataaaaaagacgatcacgaccaccagcagcccaatgatggcttttttcgccaccgagactaatcttaatcccgacttattcagcagccgggtaaaacgcatcattgccatatttctgtccgaattatctctttagctgccagggtgggctattatgcagaaggaatccgatcctgcgattcacttattaaacatagactaaaccaaccgcctgttcttattgtcagatgaggagcaaacatgaattatcgccggagtgtaacaggtcaggaataaacaaatggaatggtggattaagaaactacgcgaggcctcgacgtctacacatacccacgcggttctgcaaagcggccaactaaccatcattgcggaactcacttcctgcggccgacgtttacaggagggcgataagctgacgccgttggctaacgcgctgtactgcattaacgacaataagtcgatcaccctaaaagtgctcaacgccacgcatttcagcgctgaacgctggggcgccatcgcgaatatcaccgcgcattaatcgacatcccccagcatcaactggttctaatctcagtactttctcaactaagcgggttaaattgtcctgcgcctttttcagtctgtgacatactaagcaaaacgtcagcagagcagaaacaaggagtacgtcatgaatcagaaagccgccaggctgaccccagaacaggcgcttacgcagctcgaagcgctctatgaaaaatcggtcaatgcgctgcgtaaagccctcggcgattatattcaccataatatcctccccgagaatagcgcccgtgcggaaggactgttcgtttacccgcagctgtcggtatcgtgggacggagcggaacataaagcgttaaaaacccgggcctggggtcgcttcacccatagcggttgctataccaccaccatcaccaaccctaaactgtttcgcgcctatctgctggagcagctcaccatgctgtatcaggattacgatgccgcgattaccgtcgggctgtcgcaacatgagatcccctatccgtacgttattgatggctctgaactcacgctcgatcgctcaatgagcgccggcctgacgcgttttttccccaccaccgagctgtcgcaaattggcgatgaaaccgccgatggcctgtttcattcgacggaatactatccactttcccacttcgacgcccgccgcgtcgatttctcgctggcgcgcctgcgccactataccggcacgccggttgaccatttccagccgtatatgctgtttaccaactacacccgctacgtcgatgagttcgtgcgctggggctgtagccaaattctcgatcccgagagtccctatatcgccctctcctgcgcgggcgggatctggataacggcggacacggaggcgccggaggaagcgatttccgatctggcgtggaaaaagcatcagatgcccgcctggcacctgataaccaaagacggacaggggatcacgctgattaatattggcgtcggcccggcaaatgccaaaaatatctgcgaccatctggcggtgctgcgtccggacgtctggctgatgattggccactgcggcggcctgcgtgaaagccagaatatcggcgactacgtgctggcccatgcctatctgcgcgacgaccacgtgctggatgcggtgctgccgccggatatccctattccgagcatcgccgaagttcagcgcgcgctctacgacgccacgaagcaggtcagcggcatgccgggcgaagaggtaaaacagcggctgcgtaccggaacggtggtcaccaccgacgatcgcaactgggagctgcgctactcggcctcagcgctgcgctttaacctcagccgcgcggtggctatcgatatggaaagcgcaaccattgccgcccagggctatcgcttccgcgtcccctacggcaccctgctgtgcgtctccgacaaaccgctgcacggcgagattaagctgccgggccaggctaaccgattctatgaaggggccatttccgaacatttgcagattggtattcgggcgattgacctgctgcgcgccgaaggcgaccacatgcattcgcgcaagctgagaaccttcaacgaaccgccgttccgctaagcgctgatatcatacgagcagaatacactcagtccggatcgcgtgaaatatttacgcggccaccagccggactgagcgttataaaataaagcgtttatttttgttaggggtaaaaaattctcagagcacatccatacgtgtatatccgcacaatattattcccactatgaaaatcaacaaataaacattttattaacatgtcagtatcattttccctgtggtcataaaacgcccagccgagggctgattaatacttgaactaagtctcgtaacctattaaattaattacataaattcacataggacaaaaaagcggcacaaaatagccagcgccagagagagatcaaaataattaaagagttacctatgggcgctactctactctggaatcatcctttaatagcgacaggttgtttgcaacaaataccttgttactaaattaccagagatgaaattgcgcatgtcgacagtaggcaaccatgaatatgcttatctatcgcgatcggcaatgtactattttcgtaaaagtatggaagacagctttatgaaattaaccatagggaatatccgcctgtttattttattagcaactctttttttctggactgccgcgatcgggctaatttcccttattgtatcctggttttaagaccctgacggtgcgccgggaatgttcttgtgccccggcgttgccaccatcgtggctatggaataggaaagcaaaaagcccgcttaagtttccttaagcgggcttcttaaatatggctcctctgactgggatcgcctttgccagtaactggctaatataaaagataattaaaaagtctcttatgtcaagaccaccaagatgaccatcaaaactcacaagtgagtcgtactattttttgtatgtactttgttctaatatttattgtgcacttagtaggtttttattaaaaatgccacaaagaaagaaaagttcaataggtagctaacgttctataaaattagagctgttaacttaagtaacatagatataatatgaaggttggataaatggaaattaataatgtttcagaaatgcttaggtgtttcatgatagcagaacgtgatatattgaataattccgatattatccatgctccgactataggggaaatgtatgaaggattgacaaaggatatattaaaaaaagcaataccttcagaattaaatctatctgttgtgaatggttttattcatgatggacatggtgggcaatcgcgacaaattgattgcatggttgtacatggtgaaggtgaagtaattaggcacaccaataaaaaaagataccatgtaaaagatgttgtggcaatatttgaagtaaaaaaagagcttttgtctgaacagttgaaggattctatagatctattaacgacgattgatgatatatatttttcttatagaagtaaaacattagatgcacctgcattttctactttttatgctgctaaatcatttgagagaataacgggaaagattgctcctaggtatgatgaaaaggatagtttatctatcttggatagtgcaatttatcactctttagttattgatcagctaactcctgtcagaattgcaattggatataatggttataaaagtgaatataatttcagacagtcattttataactattatagtagtatgggaaaattccgaacattcaaaatacctagtttattgattagtgatggtttttcaatagtgaaacaaaatggttatccatattatttattcttaaagaatagagggtggtgtattgcttcttcatgtaaaaataaccccttgattttaattcttgaagttattttttataaaataaaacaaatgtttgatgttcaaatagaacttgaagaggttgtggaaaatgaaaatatgactccattagtgttattagataaaaaatcagagaaatggaattttaccttctgtgaatataaccctaatgatcttaaagatagggatgattttttaatatgggcacctttgtatttaaaagaagatgagttgtccattataaaagaaatttgggatgcaggcggtttgtcagaaatagatatattagcgttcacagaggaattcccaactttttcagacattcttgtaaagctcttggaagaaaggtttctgatctactctggtgatttggttgctgttaactctgatattttcactcaacaagcagatgaaggatactacttatttccatcaaaagagaaacatgaagcatggaagaaaaaatattatagcacttaagttttacactatgtttgaaatattcaaatatggttttctgaatgaaaatactagccataataggccttcgcttttatatcatacattggcggactgacagttatttatatgaaatactgtcagtctttataccaatttgaatttttcaattcgaaaatgaaataggagtttaacaactcaatctcagccattcatttgtatctaacccaactctagatatattagaggcgagactattagcgatagattgggctacactatttttaaattcaccaatccatgataattcagcttgttgctcatcatctttaatgtaacaaacaacaagtctgttatcccttctaattacttttattgagctggtggttatatctggaatgagtttgaatatgtggatgtccttagagccgggtttaattttaaacttcataaaagtatcatctgcacttcgtaacacatgagtaaatttagggttagccgcagtcatcctatctatttttataaaaatgaaattagtagggctctgtatacgaacactatcacaaagtggttgcatacacatataaaattcagtgtcactttttttaacgatagagccttgttttatagtcggaagtggggatgagtcggttagtgattttaaatctctacgtttgcactcaattgcgcttaagttttcatgagggagatactcaacaccatttaggctaatctgtattttggccttcttaaatttttcaattgtctcaccattacgtttcataatgacaggtgcttctgataaggtatttaatagagtatcttccgattctgtggataaaagtcttttgattctgtcggatgtgatggaaatgttattaccatcattgattttaacttggaataaatcatcacggttctcactattaatataatctacccaatcatgaattctagttaagtttaaattatttgttattgattgactaatttgaaggttggattttatttcttctgaaataatgtctgtagcgtagtcaaaagcaacttcatgagctttttctctcacttgaggtgaagagaaaaggccaacaacatgggataagtaagcaggatcaagctgtttattgaatgtgtgtaatatatgatgtgttttttctcttaattctcctatagcggaaagagtagcattggacagtaatccaatagttaattttgtaaacaatgttataactctgtcaactaattgagcagcgtcaaccattttttctatgacttcgatatgacaaaatttaaaaacgtcatcattaaatgtgatttttgtactttcaaaggtattagaataaccttttgaattcaaatgatctgaaactacttttgtaatccctgtaagttctggtgaacctgtataaattacgataagtcgtaaccgaccttgttgctctttatcatgttgtaatatttttgcaatgcttgctatagccagtgtaccatcgcgctcctgactatcttgattgtttttaaactgcgaatccatttgccagtctaaaatagtaatgtctgtatgtttggaacctgtcattattcggtttgatgcgttggggatatttacatctctcgatggatcaggtttaaaagcgcagcaatttattcctttatctgagaatgcaatagataaatcttggtaattcagtgggttatccattggggctggtatgagtggggtttgtggtacgacacctaacccactaacgtcattactagctgcatcaaactctgcaaaatcatcattaacagaactatctattgtggtaattgcttttccaaaggataattgatcgtcaacagcgataacgttattaagaaatctacttactatttccttagaagatgcgaagaaatttgaattttccaatttataactccaaaattattctttatcttgtatcggttctataataaaaacggcaccagtgttaggttgataagattcaagagtaatatcaaaaccatcacgctgtaatgtttgtcgagcgatatataaccccattccttgtccaccaatacggcgcccaaaaccgaattcaaaaacgttctcatggtcgatagtaggaatacctgggccactatccattattttgaaaccatttttggaagcatcaagagttatacttttatccgccgagcctttcgatacccaatagatcgcattatctattaaattaatgaatacggaatatattgttgatgtataagcttgaatactttggttaataaaactagatgtgtaacttatgcgaacctcttctttcttaaatcggtcatcaaataccgactctataaattcactaagagctttccctgttatagtcgtccgtcttcttgactgcgacctagtcaatggtgtaaatgttttaagatatgcatcaagatgatcgaagccagaacgtacacgatcatatattgctctgaaattttcactgcggttagcgaaaacttgcatttcattgaggccgcgacgaatagaaagaacattatgattgaattcgtggttaataattcctacagccattcctatttgcgctaaatgaagattcctatcattttgttcttttatatgctcatattctgactccagaacagaaacaagttctgatgatgatgttatattttgctctgaatcttcttttgctgtcaataatctttcggtaatcagattaatattttcaattaccattgaagaggaattatcaatctttgtttctagttcatttttaatacgataaagttgttcgactgtaacaccctggaaacttgtggagttgaacgcattgaatacttcatctgtatttttttttgcaacttccctgttatgggtaatcattttttttacttgttgttgcaaatcttcaagaatagacgtggccttattaaaagcttcattcaatagttttctttgatactcatcttgatttactaacgagtcattgaatcttcttcttagcccagtcctatcaccatatttctcttcgaaactaactaatattttatttgcgttgttcttaacattactaatcttattgataagttcattttttctgacttgatataaatcccattggtcagctaagtttttattaaggccaatgccagtaggtttatttatttctatatcattaatcaacttaccaaaatcattatttactactgactcaacagagaaggcaagatcatctattgaatccgtattttgattgaaattattaaagagagtgtccagtttattatttgactggagaattgaagagtctaattttccttcatcaagcttggtgaagaatttgttaagtgctgcttcaaagttttttcttttagtggtcttaagtttttctcttttctttaatagttcgtattcacgctgttggcgtgctcttgtttcgataaaggtagctgcaagttcacttttatcattgaaaaagtctgatgcaattgagataaagaaattttcaaggattgcttttagttgtttgtaggctttattttcaataaaaccttctcgacctgctttttctttaagttcacagttaaattctttagtcagttcgatagcgccaaacattctgcgataagaaaaaaaatactcttttaagctcttagatctgcgttgttctatacgaaggaaatcaaaatcagaatcaccatatggtagaattcggattccatctcgataaatgtaaagcccaccaaacttatctgtcttatctcttaaatcttgccagatttcaggcgataacttactatctctttgtgtaccatgaatataagcaagattgagattaaatggaccacataaaacctctttgttattattttctgcccacggtactacaatagatttctcttctccataaatttttatggttccttcaaattggccgaattcattaaaattgccattaaaatggtgatctgcaatcgaaaactcttctggtgtaaagaaaactgactcacttatcctatcaatacattcgccatgaagtgtatgatcacgaaaacgggcaataataggtacttgcgaatgctcgtacatcgtatttgtaaaaccaagtaacgctttctctaaacgagaggcttgatcagtacgtttcttggtatcaaatccttcaacttcgtcagataatatatcatcaacaggcgctataataaaatgtgtcccactttcattttctaaatttaagtgagggcgtgaaggaattagattaagttgtttatctaaattatcaagagcgatggaccagaactcaggatcataatcaaagtattctatttgtttaataagctgctcaattttattttgagaaatcttgcctgttaagttattaacatttttcaatgcttgtgaaattaagttatcgatatgctttttattcaaagactcatcatgatttaactcaataataggtatgtcaatatcttctaaattaagctttggtaaggaaaataacgtccaatttacaaaagatacaacgatatttcctaatatatcatttttgcgggagcgtgtaattactaatacctgaggtccaattgccgcaattgctaaacgtccaattcctttttcacccataatagggcgtttcttctttttgtcgtcagtagtcggtgcaccaatactgtcttcatcaatgaatttactatcagtgccaattgttagccatctttcttcaaaatcatctcggctcattcccaagccgttatctcgcagtataagtagatttttttttcttatataatctacttctacgttgtcagcatatgcatcatgggcatttttgaacaactcgcttaatgcagttggaatccctgcaatctgttgtctacccagcatgtctaaagctcgcgctttggttttaatttttgccattctataattgggttaacaacccccatcctccctattagattttgcctgctctaatattgattcagcaactcgctgtgccaacaatacaggtactgcattcccaatttgttttgatttagatacattactaccaagaaaatgaaaatcttttgggaatgtttgaagacaagccgcttctctgaaagtgattgcgcggttttgagttgtatccggatgcccaaaacgaccgttggaaatgctcgtacattttgtagtcaaagttttacatggcttatcccagctcatccgaccatagacgtccgtgtggccatcatattttctgtggcaattcaaccatagttcatcaggccaatctcttctgtcaccaccttctggtgtatgctgtagtctcttaatgttgatgggttggataacagcagccgcatgtagtaggtcattactatctgactcacctgcttgtaatttaggcagacttccaatatagtctcttactgtagcgaaaggaatattatcaactccatgtgagtaagaagggaatattggtttgtcatttagtcttgctaacacaacaagtcgttttctttgctgaggtactccataaaattcactggaaacaaccttgtaatcatactggtaaccgaatctactaataaaattcaaaaaatcagagaatggtccattttcttctattttgatgctttgaatacctggtacattttcaataaaaataaaagctggtcgaaatgctcttataaatcttttggtctcacccaataacgttcttcgtttatcacttgagttacgaattttgttttgagaagaaaatggttgacatggggcacaggcacaaaagaccagctcagaactcttcagatctggtactagcttagcaacgtcttttactttgacgttcctaatgtcatcccgaatgaactttgtgttggggaagttcgctttatagctactagctgcattttcatcaaaatcaatgccgagagcaacctcaaaccctgccagttcaaagcctttactagctccaccacatccacaaaaaaaatctataaccctcattgataaggttatccctgtattaaaattagtcttttttccgctgaggacagcggttcgtattgattacgagcattataataccaatcgctagtcctgtaatctttctctaggtatgctgtatccacactcagtcagcgtttttgatgtttcgcgaggtcgcatggataaaggcagcatatggttctataccagattcagccgtcatctacgctgccagccgctcgaccaacccatcctgagaaaatttgttaatgtaatgcttcattattttcactgaatctaccagcatcacatgctcgaccgtgtttctacacctggtgttcaggttaccacaatgtattcatgaggtaagccctaagatgatgccacaccgtccatagccaatcaaagcggtgcaaggtgcatagtttattcgcgcacagcaaaagcctatttcaccactgcggagtaagggggtctacgcccggctatgcaggggtaagttttttctcctgtgagcttttcattctcgtatcggcttccggttaatcgtttcccaacacaacccgtcccgcaagggtaaatggcacgcatgctgcgcccctgcaggacagaacgatgccaggaaagcgaaccctcaggcgatacgaagacgaaaatcacacacagacggagaaaaaaccatgacgatttccctgcatactacctagacaagcgcccctaacgccgcagcggcgaccagcgtatccccgctggacccgtcaggctcctcaaaaacgaaattttctaaaaccagaaccgacatttaccagactgttactgacaacatccagcagacctttattcttagtccctttcagcaggtcgataaaatgacgtggttttagttcagagacagatagatgcccaatgatcggaaaaatatggttattcatgctgtcgagcagacggagggcatgattctcagaccatgctttgttgcttttatgccagcttagtgcaacagacttgaaggtttcttctggcaacgcagtggctctttcagcggagcgttgttgtgctgggtgattttctgcaccagtagcttacggataccgtcacgctgttgacgagcatcagacagagagacatcaggataagcacctaagctgaggcgggattcttttctattgatgcgatatttaagaaaccagagacgtgaactacctggattaaccagcagatacagaccttgagaatcagaaactttgaaggcttttgcgcatgattttaagttgcggatttttgtgtcgttaagagacatttgggtgtcacgccgtcatcgaaccagcataaccccaaatctgaccaccaaattctcccgatgtggagggtaaaccgaaaatacatcgggaagacttttcacgctaacttattggaactgaatcaaatagggattcgcaaagcagcatgaaaacaagaagttggctcctctgactggactcgaaccagtgacatacggattaacagtccgccgttctaccgactgaactacagaggaatcgtttgaacgaggcgcatattatcgatggcgccccaccttgtcaaaggctgttttcacatttcaaaccgtttgccgaataattctccactttgggcgaaaagtcccgtttcgcccaccgcgtgttacgtttcttcaacctgcgcgcgggtctcgtcggcctgcgctttcgttcgcggatacttccacagccagcgcccgctgaccatccggcagtaaaacaaaacgccgcgcaccgcccagtcaagcaccatacccagccagacgccgatcacccccatgcccagcacaatccccagcgtgtagcccgccaccacgcgacagccccacatgccgagcattgagacccacatggtgtaacgcacgtcgcgcgcgcctttaaaggcgcacggcagcgtccaggccatcgcccagatcggcataaagaaggcgttcagccacagcagctctttcaccaccactttgacgtcctcttcgctggtatagaacgaggcgatcaggccggcaagcggcgcggttccccaggcgatcgccgtcaaaatgatggtcgacagccagaagacgtgccacgcctgacgctccgcctgagcgatctgcccttttccgaggcgtcggccggtgataatagtcgatgctgaaccgagcgcgttccccggcaggttgatcagcgcggccacggagaaagcgataaagttaccggcaatcacgttggtccccatcccggcaacaaacatctgcgtcagcagcttaccgccgttgaacaaaaccgattcaatgctggcggggatcccgatgcccatcacttcccagataatggcgaagttaaacggcttaaaatagctcttcagcgaaatgcgcagcgccgggttaaaaccgatcattagcacccaaatggtggccaccgcgccaatgtaacgggcaatcgttaatcccagccccgccccgacaaaccccatgccgggccacgagaaaatgccgtaaatcaggatgctgctgataataatattgaggatattcatcccgccgttgatcagcagcggaattttggtggtcccggcgccgcgcagcgcgccgctgccgatcagggcgattgccgccgccggatagctcagcaccgtcagctccagataggtcagcgccagagcttttacctcttctgtcgcatccccggcgacaaaattaatgatttccgcgccgaaggcatggatgaccgccgcgagaataatcgagaacagggtcattatcgccagcgactggcgcgctgccgcccttgcccgccgccggtcccgtttgcccaggctaaacgccaccaccacggtcgtaccgaggtcgatggcggcaaaaaaggacatgatcaccatattgaagctgtcggccaggcctacgcccgccatggcctctttaccgagccagctaaccaaaaaagtactcaacacgcccatcagcaatacgcaggcgttttccagcaaaatggggaccgcaagcgggctgatttcacgccagtagaggacgcgatagctcttgcgttttttaaaccaggacgtgcgttcgacggactggcgtaatgcggcggtgacgttcaagggagaccttagtgagaaaagttgaaactacatttcaaatgatgatagagaaaagctaatcctgcaaagcatttttcccgataaattgtcgataatggcgacaatttgttgatggatgcgccagttgagcctcggacggcgaatagatgtttgacaaaagttttttcgccgctaagatacgactccacaacgattcctctgtagttcagtcggtagaacggcggactgttaatccgtatgtcactggttcgagtccagtcagaggagccaaattcttgttttcatgcctctttgcgaatctttatgtaatttagattcaataagttagcgtgaaaagtcttcccgatgtatttttagttttccctccgcatcgggagaatttggtggtcagatttggggtcaagttggttcgatgacggagtgacccccaaatgtctcttaacgactcaaaaatccgcaacttaaaaccatccgcaaaaccctttaaagtctccgattcccatggtctgtatctgctggttaatccaggcggttcacgtctctggtatctcaaatatcgtatcaatagaaaagaatctcgccttggcttaggcgcataccctgatgtgtctttggctgatgctcgtcaacagcgtgatggtatccgtaaattgctggcgcataatatcaatcctgcacaacagcgctctgcggaaagatccacttcctcgccagacaaaactttcaagtatgtggcactggactggcataaaagcaaccgaacatggtcagagaaccacgcctcccgtctgcttgccagcatgaacaatcatatattccctgtgattggacacttgcccgtagcagaactaaaacctcgtcactttattgacctgctaaaaggcattgagcaaaaaggtctgctggaagtcgcagcacgcacccggcagcatatgtgcaacatcatgcgtcatgccatacatcaggagttgatagagaacaatccggcagcaaatctggagggtatcatctccccgcccgttaaacgtcactaccccgcccttcagttggagcggctaccggaactgttggctcgcattgaggactacaagcaaggacgagagttaacccgcctggccgtattactcacccttcacctattcatccgttccagcgagcttcgtttcgcccgttggtctgagatcgatttcaaaaatagaatctggaccattcctgccactcgcgaggccatctccggtgtccgctactctgggcgtggtgcaaaaatgcgcactccacatatcgttccactctcccgtcagtccatcgctattctgaaacagatacgggaaatatccgggcatcgcgtgctgatattccccggtgaccataatccgtataagccaatgtgtgaaaacaccgtcaacaaggcgttgcgcctgatgagatatgacacaaaaaatgaaatctgcggccacggattacgggcaatggcctgtagtgccctgatggagtctggcctgtgggcacaggatgcggttgaacggcagatgagtcatcaggagcgtaacagcgttcgagcggcttacatccataaagcagaatatctcgattcccgtaaagcgatgatgcaatggtggtcggattatctggatatgtgcaggaaagcgtatgccccaccttatatttgtgggaaggaaatcagttacacaatgggataacccctctgacagaataagccacaaaaaaaagccgtatcagtctgtactggtagggcatttttctggcttcaactcggagaaattgttaagccgtttatgagcatctttaaccgaattgacctgcgtgaatcgaaagtgtgaggtccgcttatcatttagatctatccacggaaacggattgggtcagttatgagcgaactatagtcattctaaccctgagaattacacttttgagtgattcagggtatgcgcttactggttacgaatattgagcgagaatcatgtgatgatcgccgcttctctttcgaaccagtaggtgctccgcgttcgctaacgaatactcagggcatgcagatacactgctgactatatttctttcgaagagtgtggaatgcataccaatccccgatgaaaggagttggtgatgactgcgactaatcaatttgctgcacatgttggtctggactgggcagataaaaaacacgatgtctgtgttcagttcaaaaacggtgaacgcgtattccatgtgattgaacatacggcagaagcgcttgatatctggcttactgagttacaccagaaggtaaaaggcagaatcgcaatagctctcgagctgaagaagggccccgtggtatatgctcttcaaaaatatccctttatcaccgttttctccgtccacgctttgtccctggctcgttaccggcaagccttctcacccagcggcgctaaaaatgacccgcaggatgccgagctagcattagagttaatgctacgctatcccaaaaagataaaagccattgaacccgacaacgcagatatccggttactccagcaattagttgagcagcgccgactgctggtcgaagacaagcgtcgctttgtaaatcggctcatcaacacgcttaagcagtattaccccctgcccctggaatggttctcccatcgggacaattcactgttctgcgagctaatcattcgctggcccagcctgcaacaactcaaacgggctcgcagcgatactgttcgtcattttatgaacgctaaaggtggtcctgctgttgcatataccgaacagcgggttgcaagtattgccaatgctattccactgaccacagataaaagtgtaatagaggcaaatgcattgatggcaacagcactcgcatctcaaatcaaactggcaggcgacctaatcagaacctacgacgaacgtattgaatccttattcggtacgcttccggatgcagaactgttcaaatcacttcctggaatgggaccgtgcatgggtccaaggatgcttgccgcactgggtgataaccgcgaccgcttcaacagcgctgaagaaattcaaaactacgcaggtattgcaccggtgacagaacgaagtggccagaaatcctgggttcactggcgatggcagtgtgctaagttcgtcaggcagacttttgttgaatgggctgccaagacggttaactcatcatactgggccagactttattatcagggactgcgagaaaaagagaaatcgcaccaatctgcaatccgggctcttgctttcaaatggataacgatcatttaccgctgctggaagaccaaactcggtacgatgaagcgaagtatttgctggctctcgaagcgcgacactcgcccttactgaagccataaaaagcttgttgaatgtctcagggcgtgaagcggacgctggtgttctttgaataaatccggcttctgtgcttgtgcactaatccagggaagaaaaatattgcgtcggtgatttacccagcgcttttctgaacatcgtaataaacgcactgaccgaatcatatcccagcgttccggctacgcgctgcacgggctgaccttcagacagatggctcagggcaatcatcaaatgcagctgctgacgccagcgaccaaagctcattcctgtcgcctcttttatcagcctggccagagatcgttcgctgatggccagatgagcagcccaatgctttaacgttcgccggtcatctggctcattaaaaagtgcctcagccataatccggattttaggatgatctgatacaggaagatggagtgcttcaaccggcacatccggaatatgctccagcagcaccgctgcaagcctggcggttttactgtcaggagaataagcatgttcctgctctgcaagatacagaacaagctcgcgaaccagaggtgtaatcgctatggtacagcagattttcggcatcgctgccgtgccgggctcgatgaataaaaggcacgtgtctgcattcttcgtgatccggcaacggtgggggatttctcccggaacccagacggcatgtcctggtggaacaagccacagcgcatcctcaacctcacagcgcactgcaccgcgcaaagagagaataagttgccccttgcgatgagcgtgcggactttgcccggcatactcacctgacgatgatacatgcagggcgatagcggcctgactgaaatcatcggcattaaactcttccggcgaggtcacagattttttattaactggcatgatttagctatatgttgtcaggttatctatattctgtaactcatgcgtcctttaaagtctttcttttttcagagaaagcaaaacttatgtcccacactacgaacaagtggtcttcaatcatacttgtgaccggcatcctttttatcgccattaacctgcgtgttccttttaccgctatagcacccgttttagagtccattcgccatgattttgggctaagtatcacagccgttgggttgcttaactcgcttcctttactggcctttgccgccttttctccactgagcgcatcgatttcccgcaagtacggcctggaacgcaccctttttggtgccctggtcgtgatttcagcggggattctgcttcgctcaacagacagcgtctgggcgctttatggcggaacagtgttaattggtatcgggattgccctgggcaatgtcctgctgcctggcctgatcaaacgtgacttttccggcaacgtggcttccgtgacgggagcatattccatcaccatgggcgccgctggcgccattggatctgccattgtcattcctctgacgcagagctggggctggaacatcgcgttagccatgttggttattgcaccgctccttgcgttgcttttatggttgccgcagttgaagaaaaagcatcaactgccagtagcaggtgagaaaaaagcagcgaccgttgcggtctggcgctcgtctctggcgtggcaggtcaccttgtttatgggcctgaatgcgatgccgttttatgttgcggtcggctggctgccagccattctgacagacagtgggctctcctcagctcaggctggtgaggtacatggcatccttcagctcaccaccgccattcccggcctgattctggcagccacgctgcgtcgtcttaacgatcagaaattagccgctgctggcgtcagcctgttaaccgcagtgtcctttattggcatcctttatttgccaaatctggcgatgctgtgggctgcactcctcggcttcggctcgggtgccagcatgatgctgggtctgaccttcatcgggttgcgcactacaaacgctggtgatgctgccgcgctgtcaggtatggcgcagagtatcggttatctgatggcggcgatgggaccgctgttgctgggtaaagtacaggagttgtccggaggttggacggtgccattactgatgaccacagcaatctcagttgcaggagcctgcaccggaatggctgccggacgagatgcgcacctggaacctgtacagcagccgggctgaatgggtttacacagcaaggtaccagctgatcctctgcggcggatgctttccatcgaggttctgaagcgtcttaatggtaccggagccatctgtactatcccgatgagcggacttttcggtgaaaaggccgctcagggcgagcgtaacattcagcggccgccctgaagctcagggcgatcgcggtcagtaataatataataaacaagccttatgactgtttggcaacgatgaatcgcttttcatcactcataaaggctttttcactggcgggtgaaaggatggcaccgaaattcatatgcgcgcggagtttccatgatggaggaacattccactcagtgcgaatatcttcatcgatcagaggattataatgctgcaggttggcaccaattcctttttcagccagcgccagccagacagcatactgtgcaatacctgtgctgtgctcagaccataccgggaaattgtccgcataggccgcaaactgctcctgtagtgacttgacaacatcctgatcctcgaaaaaaagtattgagccggcagccgctgcaaacccgtctattttatctgaggtgccggagaaactttctgcaggcacgattttgcgtaactgttcacgcgtgagttcccataagcgagcgtgctgctcacccagtaaaatcagaagccttgagctttgcgagttaaaagcagaaggagcctgcttcactgcctcaatgacagtgccgatcagctcgttctccgggacaggaatatcttttccaagtacataaatggtgcgtcgttttctggcaagctctaaaagttacctgtcatgaattagccctcagatgaattgtctgacatcgtaatttgccccgtcttgccctctgactggactgatagggtcagcatgcaataatacacgctgactcattagtgcatgctttccgaaggattacggacaggatgcgacattgttaaaagtttggactggaagtaaagatgcttcatcagcccacgcttctgaagcattaacggttccgcatcttattaatctgaatacgcctccgaagacacggtcagtgtgatattatcgcttacataaggaacgtatttatcaattttaaagtctgatctcttaatcacaccggtggcgttaaaacctaccgcatttttcttctccatagcctgaaaacctgctttgttcagggttgcatgaagaataaccggccgggttatggatttaatggttaaatttccccgtacgtcatacttatcaccattcatttcaatgctggtgcttttaaaatttgcgaccggatatttctccgcatcaaaataatctggctgaccaaactctttattcagtgctggaacgccggtatcaatactggctacaggaattttgatatcaaccagtgataaaatttttgttgccggatcgaacttaactgtgccatctacatgatgaagggatgccgtcgggttcgaaaaacctaggtggttccagctaataaccacagacgtatgcgattcatcaagtttataactcgctgttttcgcctgtgcagcagtagtaaagagaagtgaaaataacagtgaagcagaaagtacatgatatttcattgatataacccgattcataaggattgattgttattagcgcaggcgcttatatagcaagccggcttatttgataaaattttcgttattacacaaaaaaattatttgttcgtgctggcggctaatggctatcagtgtccgtaacgtatgacattatcgtgtcacaaactcagcattaccaactcattatctggttatttcaataattacgatggttaagccgcagcagcatggcacatgcaaatctcttgatttcagcgctatagtagatttagactaacttatcttcaagtacccacctcaaggtaagtatggaaaaattcaacgactgttttacactggacaacaaagaacccggtaatgttttgcgggaggcatgtcctgcccgtgaagttctcgaggttctggtgagcaaatggacattgctcattattcatgccctttctgacggtgcatcaaggccgggtgatttgcgaagaaaaattcagggtatatcagaaaaggtgctgtcacagaatcttaaggaacttgaaagcaggaatcttgttacgcgcactgtctttcgtgaagtaccgcccaaagtcgaatatgcactcacggaactgggaacgtccctctggcaggcagcgaatgaactcaaccggtgggtagaacaaaactgtcactttctgattaaagacactgatccttccatgtgacatgccattgttcatttatgagtgctgcgggctaacaggagcatataagaaggcaggctgcaggcgccgaaaagcgacttcccttgctggctcagaggcggtatcgcctgctggccatgagggaacagcaaggcattttaacaacaagtccctgcagtttgttgtatcagtacaaaaagcactcgcgtctcagtctttgcccggcccatggtcaaaccgggttcctttgccgatggcataaaactgccccccggcgacataatgtatggttcgtaattcgtcaggtgcttcatcaaatatccagtgtccattgcgaaaaacccgatcgtcactccacgcgccggcaatttctcccataaacagattatgttccagctcatatgccgcgttgggtattaccttacatacaagccagccagcacaaccctctaccagcggaacatcgaactctttcaggtagaacgtcggtattttatgattcttgtcaggcctgtcacggtagctgtgctcacctgcgtacaaaacggtttccatctggctgactacggggatctgtacggcaaacagaccactttcttccaccaatccacgggtataagcctgcggaccgatatacgccatgactttattgatccccaccagactcacccaggcagcggccatcacattggcattaccattatgcttagcggaaatcattgtagttgggccgacctgcaataatcgatatgctttgttcagttcgactggctgtaaagacacacgatttctccttcccataaatgaaaaatgtgccgttatcagcaacggcacatttgaaggcgttttaatacactgatgatcgcctgaagataatcaggctaataccgttttgtatcgtccggcctgagctgcgatttcttcgtcagttatcgtcgcgcttccgcctgtaatgaacggcttgatgtagttcatacccagatacccggagatggtttcaaaagacagcaggtactctcctaccgtatgtccggcagcgccatcaggctgataggcagactcagcacctccaagcgaaactgccagcatgagttgcttgtcgtgcagcgcctgtgtttctccaccatgtgaccagccgtacgtcagtacatcgtcaagccactgtttcagaagtggcggcgtgctgtaccactgcatagggaactgcagcacgacacgatccgtcttctccagggcagcctgttcagcggccacgtcgattttgccatccggatacaggtcatagagataacgcacttcaacgcctgtcagtgatgctgcaccttttgccagggctgagtttacccgggactgattaatgttgggatgggtaacaaatactgttgttttcatagcgatctcttattttttcagaagaatgtttcgtcaatttcaagccgggataaggcttcgttgatatcatttaattcggcgtcactgagctgaacatttgcggcgtgaaaattctcttccagccggtgtagttttgttgttcccgggatcggcacaatgtaaggcttctgagccagctcccaggcaagaacaatctgtgctgaagttgcgttgtttctttctgcaatttcagcgattagcttaagaagcgtctggttattttccatcacctctggtttgaagcgccccatcatgccccggtaatcgccttccccgtaggttgtattagctgtgacctgaccactcaggaatccattacccagcgggctataggccataaaaccaatatcaagttcatcgcagaccttaaacagatcctgttcaggtttacgccacatcattgaatactggtcttcaaccgcagtgaccgggcagatggcatgagcccggcgtatgtaagatacgggcgcattggataagccccagtactttattttgccctccgcgatcagctctttcattaatcctgccaccacttccggctcaacttttgggtcgacacgatgctgataaaacaggtcgatatggtcggtcttcaggcgcctgagggaaccttccagttgctctctgacagatgccggacggctgtctaatatcggcaccagctgtccatcactattttccattcctgtcacgccgaatttggtcgcgatgacaacgttgtccctgtgtttgctgagcgcaacccccagcagtttttcgttttcaaatccgtaaatgggggcagtgtcgaaaaggttgcagcccagctctacagccttgtctatcagctttgtcctttcccggatctcaactgaatagccatagccatggtccatgcccatgcaccccagccccatttccgagacatgaagcccctggctacctaaccttctaattttcacgattatttcacccttctttaaggtattaactattcttagatgctaagtatacggttggatttattgctgaaaaattgttaatttagaaaatcagaattgctaaaatcacaattattatgaataaactcgatgccctgagattttttgttactgctgcagaaacaatgaattttcgcgaagcggcagtcaggctggccatttctccatcagtggtgacacgcacgattgctgatctggaacatcagcttggcgaaccgctttttaagcgcaatacccgatccattgtgctgaccagctttggtgagtttttcttgccccgtgccatgcggctgcttgaagactcagaggcccttttccagacggccagagatgacaatgagatgaagggagttgtgaggatcacgctattccggtttcccggccacgagcaggtgttatatgagcttctgaccgctctcgatccctatcctgagctgtttattgactggcggttagacatgatgaagctggatactgtccagaaccgtattgacatggggatccgtatagagcgggagccaaacccgaattttatcgtcaggcccattacgctggttcatcatgccctgatgacttctccccggctcattgacaggctgggcgcaccgaaaaattttgaagacctgcgtcagcgttaccctttcagcggtctgcttaaccctgaaaccggcaaggtgtttgaatttatgctcgacggcgtcaatacctttattccccggcacctggagttttttaccaccgactcccagtctgagattcaggctgcgttaaccggtaaagccgtgattcagtcgagtaatctggcctgcagggaataccttgaagacggcaggctggtgaatgtcctgccggaactgaaactggaaacctggcagctttatctttaccggccctatcagaccctggtaccacagcgcatcaggaccgtttttcacatccttgaaaatattttactcagacactttagttaaaagagggcccggatgtggctggcgctcttagccggcgtccccccgtaaaccggagatgtgaatttctgggtacagcctttctccgggaagtcgctgctccgggatgctcatatccgcgaaataaagtctgccgttctttcaggttccctgaatactgctgacttttagtatgcaacggggagctgtgacagacgtatcaactgaatatttcatctatccagtctgcaaatgcacgtacggcgggtgaaataaaacgctgatggggataaagcaatgcgacaggaacagacgacggctgccagtcggccaggacttcaaccagcgttcctttctgaaggtgttctgctacaacgttctcagcaagctgcgccagcccgaacccttcgaggcacatttttatatagagtcccgtctcgttgacggctgcctgccccctgacgggtacggacagcgtttctgttccctttacaaaacgcaattcgtctgtacgccggctttgtccggaaaaataatgaatagcccggtgatgagataaatcttcaggtgactgcggaataccgtactccctgagataatcgggagaggcgcaggtgatccagcgaaattctccgagcggacgggctacaagcgtggagttaagtaactctccggttctgatcacgcagtccacgccctcctgaaccaggtcaacctgccggtcgctgacgccgatcatcaggtaaatatcaggataacggctgtagaactctttcaggtttggcatcacgaggaagtgcgctataccgccgggcatatcaacgcgtaaacgaccacgggggcgcctgttcgaatcggccagactggcttccgtatgttcaattaaggccagaatttcccggcactgcgccagatactgcataccttccggagtaaggctgacccgtcttgtggtccggttcagcagacgcacctgcagatatttctccaggtttttgatggtgctggtaacagtagaagaaggcagggacagtgtttccgctgcccggacaaagcttccggcctcagccacccttataaaaacctgcatagcctgaatacgatccacctgattgcgctcctgaatagcatgtgacggtgataaccatcattattcgcaaattctgaatgatgaaaacacgttagtcatctttttcagcttaaacaggaggcgtattgttttccttctgaacctgaaagagacaattcaaatgaccgattactgcagaaatattgttaacaataagacggcaaatgctccggtaacgctgatcagcggtgcaaccatactgagtatggatgagaatgttggtaaccatgaacgtggcgatattcttgtcacagggtcaaccatcaccgccatcggtaaggacctgaacgccgagggtgctcacgtcattgatgccacaaatatgattgccatgccggggatggtcgattctcatcgtcacgcctgggaaggccagctgcgccgcatcaacccaaacgccacctgtctggacgactatagcaatgccacgcacttctcgtttgcgaaatactatcggcccgcagatatctatgtcggtaatctcctgacggcgctgggcgcgattgatgcgggtatcactaccatgattgataactcgcacaacagccgtaccgcagcacatgcagacgccgccgttgaagccctgcttgatgccggaattcgcgctattcatgcttccggcgcgccggtagcaggcgaatgggacagagcgcactggccgggtaactggcagcgtctgcaggaaaaatatttcaaagacaatcctgagggactggtttctctgggcgtcatggcccagctggagccggaattgtgggccgaggcccgccggctcgggctgccaatcgtgaccgaattctttggcgctgaaatggcttcagagcttaaatcattgcatcagcagggcctgctgggcccggacaatatcttcaaccactgcacagcactgcctgatgagggctgggaaatcctgcgtgaagccggcgtacgagtgaacgtttgtccgcgctcagattcgcactatggcattgaaagcgggatgtttgccattgaggccgcgcagcgccatggcatcaatcctggcctgagcgtggataacgaaacgtcttacagcacagatatgtttatggaaatgcgcgtggcgttctatctgcagcgagtaatgggtatgcataagcagcactgctgtgattcagggcattctctgacaacgctcccggcagcgcagctgctgaagtcggcaaccgtcgatggtgcgacctgtgccggactacaggataaagtgggtagcctgacgccaggcaaacaggccgacctgatcctgattaacgctgctgatctcaatctctatccgaacgggaatgccttcgggacggtggtgcatgcaactgaacgcagcaacatcgatactgtcatgattggcgggcgcatcgtcaagcagaacggcaaagttctgggcgtggacagcgagcgtcttcgtgctgccatcgatgaatcacgcgaacaccttttcgccgccgccgggtatgagccggacatctttgcggagaaattcctgccgctggtacaggcaaactgacagggaataacagcatgagcgcgatttattacgtaatagcttttgcagcgggtcttggtattaccttgcagacaaccctgaacagtcagctcgcaaaaggactcgggggcgatccggtcaccgccgcgttcttttcctttacggccggggcgttgagcctcgggatttactcgctgctacgtggcgggttatttagctctctcgctgctattccttcgcagccagcatggagtctggcgggcggcctgatcggtgcctgtgcgttgttcagctacgtggtgctggcaccgaaaatcggtttttcagccctgctcgggctggcaatcgttgggcagttactctcgtcgcagatgattgaccatttcggtctgctgggtgctgtacggcgaccggtttcgctgctcaaactggggggcatgctggtcatgctggcaggactcgccatcatgctttttggtgacaaactttcagcgcgttttttgccctgacagggtgggaatagcttgttactgccgtctgccataatgcagatggccttacgcttttggtcaggcgcgatgcgaaacttttatatgcgggagaaataacatgttttcagtggctgctgatgccagaaatttgctgggagagtgcccaatctggtgcgagaggacacgcaggatttactggactgacattgaaggcagcgagctgcttgcccttgaagaagacaccagtgttgtgatgcgctggtccctgcctgaacgcctcggatcgtttgctcttactgaacattctgacgttttattgatgggactggcgtcccgattcgccttctgcgatctgaatacgggtatctttacgccggttgtggcgtcaccgggaggaccgggaacacggacaggggatggtcggtgcgaccgcgagggtaatttcgtcttcgggaccatggatgacggataccccgcgaaaatcataggaagatttcacaggctaaatgcagcgacactcagcattgagacgctacccctgcctgaggtggccatcccgaacagcatctgtttcagtccggacggcagcacgatgtattactgtgactcgatgcagggccgtataatgtgctgtgattacccctccatgaataaccagcgcgtgttcactgcaacagaaggaaagggagcgcctgacggctcctgcgtggacgcaatgggctatgtctggaatgccgaatggggaggaagccgtgttgtacgttatcgtccggacggaacgacggagagtatcctgccctctccaggagttcagagcacttgcccgacactcgcgggagaagcattcacaacgctgtattgtaccagtgccagcgtgggcctttctgtgccgtcaaggcatgatggagcattgctaagagcgaaatcagccgtcttccccggtttaccggagagccggttttcagcgcacacagcgtaaccgctttgctatcagtgccaacagggggaacagagtctttctcttcaccatattcggttaggcaggagaaagactctggtatttattacagcagcttaaatacgtttataatgagctgcccggggtcagatttgcatttatccaggctgccacgtcggtaaccggaatgttatggcgttcattgaatgtctgctttttatcccatgcaacaccccgcccctgtgcaaaaacggcacgatacttagacatcatgtcttgcgggttgagcgcgagtttatccatcagatattgttcgctccattccgtgcagctgaaaggacggccaagcgctgattgcagcttatctgctacctctgcgtaggtcagtgtatcaccggcgatatacacaatttcgttccggatgcgaggagttttaaatacgatcgctgccgtcagcatcccgatatcatcgggagttgtcagcgtcatggtgttgtcaatactgccgagtgcgtgaacagtatcgttctgcagatcgaccacaccgaagtctggttcgaacaaatagctcatgaagatgccggtcgaaatgatgacccactcagtttcatgctggctgcgtagtaaatcacgcacgtcaatctgcgcgtcgaagatgtcttgtggactgccgcgtccgatggcatcaaaatcggcaccaaactgccatggaaaatagcgtggaatccgcgcctgcagggccgcctgcgccagtttcatcggtgtatttatgccggccgcgtaccccgcgcagccaacgactgtgtcaaattgcgcaaagaggctggccaaatcgtcgacagaactcatgacgagatcgcccgtgactatattaataccgaggtttctgatttccgtgataacgaattgttttccaggttcatctgacgttacggtactttcgcgcagcagcacgctgattttcgttccctccacatcttttgcccgaagggcaagatttcgcagaacggggaggcccagctcaccggcaccgagcacgaggatattttcagacgtagtgttaagatctgttttgttcataatctggccttacatgaattgttgcaccactctagcaattcataacaggctaaaaaagaaggcacatgtatgataccgggagtcaatgaaatggatcgggaagagattcttcagtattcgcaggctgtttgtaaggggctgagagacgatgatgatggcttgcggcgggaggtgctggctcatgccggaagtcgctggtcgctgggtatcgtcaacacgcttggcgtttatggcagactgcgtcatgccgaaattggcaggcgtatgcacggagtgactcagcgcatgctgacgcgtacattacgacagcttgagcgtgacggactggttatccgccatgatttcagtgaaatcccgccacgagtcgaatacgaactgtccgatacaggtatggagttacttgtacggatgatcccgctgtggacctggattgtcgataatgctgatcgctttcgtgaagaccggttgagatatgaaaaaaataacagtaacccggggacgtaactggccatgaatataaacatcacttttcatggtttgtaacgaatacaagtatctgaatagataagccttcggatatgtatgtatacagtagtcatccggagacagaaccgatttcaccgggctcggccgggatggtgtaattaaagaggattagattttacgtatctctatcatcaatatcagtcggtgcatatttcaaatgggtgttatagcgaatttgattttcgccaccattaattcggccttaaaaattatctgacaggatgacctatcctttcagaataataggttgactggcgaaacaatattttaaaaactggtgattttttatgattcctaaaataaatagtgaagtctcttctgattatcatgatctgcctggttatattcatggggcgaaaattatccaagtcgctttgactaaacaccctatagacaatatcagtgatgttgtttatgagacagtgaaaaacactcgttctgtcaggcaattgcatatgtcttttctggttcctcgtaccaaaattttgaaaccagccatcatctattttcctgggggaggatttatgacagctgagcacaataaatttgtggaaatgcgcatggctttagcggaggctggctttgttgttgcagcggcagaatacaggacaattccggatactttccctgcgccagtgatagatgctaaagcagcagtaagataccttcgtcaacatgccaacgattatggaattgacccctcacgaattggtgtatttggcgattctgcaggaggatggctggcgcagatgcttggtaccactaatggcgataaatcattcgatcacggcgattttctcagccagtccgctgatgtgcaggctgtggctacgctttacggaatatcagatctgcgtaacataggtgacggttttccggatcaccgacaaaaagtgcatcagtctcctgcagtcgcggagtcactgctaattaatggtgtggctttcaagaattttgcaggtgcctccatcagttctgtacctgaaaaagcgataaatgcaagccccataggacgtctcaaaggatgtaaacctccgttcctaataatgcatggaagtaaggatacattagtatcgcctaagcagagcgcaacgctttacaaagcccttttggaatcggggaacaaaacggactacgtacttatcgaaggtgcagaacacggtgatgatcactggtatcaacccgttgtcataaatagggttgttgactggttcagcgggcatctttgtcctgataatacatgatgactgacgctctgttgaatcactcaaactgttgtcagcaacgtccgcttcacgccctgagacatttgacaagctttttacggcatcagtaagagcgattttcgctcttccaatgccagcaaaatagttagcgaacgtggagcacttactggctcgaaagcaaagcggcaatcatcaaaccgcatgattctggcacaatattcgtaaccagtaagcgcataccctgaatcacttaaaagtgtaactctctgggttcgaatgactatatctggcacaggctgtgtgaaaactctgccctagaactgaagtgcgcgcatctacgcaaaatctggaattgctcgactggttagtttacgtatgagcgcagttttcagccctgttttagtcgcagtttaatctaccaaaacagttttcacacagtctgggctcggagcggacaggctcaggagtatgatgtccgctataagcgaacagcggaagttcgcatagaataaaaatggcaatgttgcttacatcgtcagagctggcagtgaaatgttgaccattttgcaggatgttcgatgaattcacgcaatgcgtcgagaaataccgtgactctggcaggtgggtgacgtaacgcgcgtagcgcatatattcctgtagatacatgtggttgcgatgacatttccggaaagagttgtaccagcgcgccactgttaatgtcatctcccgccacccagtccggcaggaacgcgatccccatcccttcgaccgctgcctgacgcattgcttcgaaatcatcacagccaaacataggcaggcccgagttttctctggccggatggccaatcacgctcgaccagcaaagcagatccgcaccgtgcagcttatcgattaaccgatgtgaggcgatgtcgtccagcgaggcgggaatccccgcgctttccagataggcagggcttgcgcacagcacacgtatttgcgttgctattttgctggcaatcaacgtgctgtcggccatattaccaatacggatgacaacatcaaggcgttcagcgacggggtctgccaaccgttcggtcagatccaaatcgaagctcagcgccggatactgtcgggagagttttgccataaccggcagcacatagcgtttaccaaatgtgggataacacgccactcttagcacaccggttacttcgcccttcattgacgccagttcctgctgcgtatcctccagtgaatcgaggatctgtctggcgcgaatcagcaacatttccccggcatccgtcagggttaaatgccgtgtagatcgcaaaaaaagcggggtatcgaggtatgcttccagcgcatcaatctgccgtcctatcgaggagggcgtgcgtccgcgacggcgaccagcacccgaaaaactgctttcacgggcgacatcgacaaagactccaaggaactcggcaaatttctctgattgcatctgtgcatttcttgcatagctgttgtggggagaagccatcttatcagtgatgtgcgctgaacttaagatcccctcagccgaatgacattacacaaacacgcacacactgaggataacgaccatgcaaaatcatcaatacgatcccctttatctattcatcgacggtgactggattgaagcgggcaatcgcgacactgtcgctgtgattaaccccgcaaccgaagccactatcggccgcttgccgctcgcgaccgccgccgaccttgaacgtgccctgtcagccacccgttctggctttgacatctggcgccgtaccgtgcctgccgaacgcgcccgcatcatgaagaatgccgctgccctgatgcgcgaacgcgctgaacatattgcctcgttgatgacgctggaagaagggaagcccctggctgaaagccgcgacgaagtattgcgtgcagccgactattttgaatggtttgcggaggaagcccgccgcattgatgggcgcgttgtaccgtcaaatcgccccggtgtactgcaactggtcaaaaaagagcccatcggcccggttgccgccttcactccgtggaatttcccggccattaccccggcacgcaaattatcagcggcgctggccgcaggttgtagcgtgatcctgaaacccggtgaagagagcccggcgacggcgctggctctggcacgctgcctggatgatgccggtctgcctgaaggcgtactgcaaattgtgtttggcgtaccggatcaggtttccgccacgctgatcgcctcaccggttattcgcaaagtggcattcaccggttctgtaccggtaggtcgactgctgtctgagcgtgctgccgccggtgttaaaccgattaccctggaactgggcggccacggaccggtgctggtttttgccgatgccgacattgatgcggcggcaactggcggagcggctaaccgttttcggggcaccggccaaatctgtatctcttcaacccgttttcttattcagcgaggtgtttacacacagtttgtcgaacgcttcgtgagtgcgacggagcaactgattatcggcgatggcatagcggaaggcactcaggtggggccgctggcgaatatccgccaactggaaaaaatggaatcgctgattgccgatgctgttgccctgggcgcgaaagtgctcactggagggaaacggctcaaccgtcctggctttttctttgaacccacggtgcttaccgatgtgccgatggaagcacggatcatgcacgaagaaccctttggcccgatcgccgtgatgcgtccgttcgacgcgcttgaggacgggctggcagaagcaaaccgtctgccgtatgccctgtcagcttacgcttttacgcgtgacgcccgtaccgtgctggatgttggcgatggccttgaggccggaatgatcggcattaatcagtaccgcatggtggcgacggaactgcctttcggcggcatgaaagaaagcggacatggttcggagggcggtcgggaaggtctcagccattatctggtgaataaattcatcagccaaatctaaaacacactggcactaatgacagaatataagaggaactgaccatgaaagctgttgattttactcgcccgcgtgaagctgcacgcgcatttactcctaaactgtccggcttcgttgagcaaccactgtattccgatgtctggacagatccggacctggcaccacgcgaccgtagtctgattactatcgcctgtcttatcgcgctgaatcattccaatgagctaccggcccacctgcgtcgcggcattgaaaacgggctgaccaaaacagaaatttccgccctgattacgcacatggcgttttatgcaggcttcccggcagcgattaccgcttctggttatgccaatgccacgtttgaagaacaggcctgaacgacggctatccatcttcttatttcgggaaagagaatcatgaaagcaatcacttttgaacaattcggtccggccgatgtacttaatatcagtgaagtcgcagacccacagctgcgccccaatgatctgctggttcgcacgcgggcagcgggggtcaaccgggccgatctaactcaccgacgcggcgggtatggccgccctgattttggcgactcgacgattatggggctggaaatcgccggtgacgttattgccgtcggggagaatgtaaaaggctacaacttgggtgaccgtgttatgggtatcgtcgggggcggggcttacgctgaaatggcccgcattgattaccggatggctatgccagtgccggaaggtatggactatatccatgcggcggccattgccgaggtctttgtaaccgcgcatgaagcgcttatccatctggggaaactgaagcccacggaaacggtactgatccacgccggggccggcggtgtgggaggtgccgccgtgcaactggcgcatgcgacaggcgcgacggtaatcaccaccgcgaatgctgcagcacacgatctcgttcgccgtctgggtgccgatcacgccattgattacgtgacagaagacttctccgaggttgtcgccagcagtacggataacaagggggttgatcttattctcgattttattggcgcgccttattttgaacgaaacgtgaatgcactcaactttggtggacgtctggtgcagattggcatcatgggggggattgaaaacgcgaagatcccgctggatcgggtgttgtaccgccatctgcagattatcggtacggtaatgaaatcgcgttcgcaagaagtgaaacatgagatgtcccgtcgctttaaagagtgctggttaactcgcttcggtaaagatgggctgagcccggtgattgacagcgtatttccgctggctgaagccagcaaagctcaccagcgtatggaagacggcctcaatgtcggaaaaattgtgttgacgatgtagaggacgcaaacaataaggcgacttttcctgccttttcgtcactaacccccttcgctatccggcatgaacagcccgcgcaatattctctgggctgttcaatgtcagaggatgtatgaagtaccgtcaaaaaagcatcactaatgggttaaaagtgataccagagtattgctgttacattgtttgtcaaagctaagttcagatgtccgctcatggcaccaaactgctgtaggtgaagcccatcaggctgcttcgagcgaaaagcggacatcttaagtcggttgttttttatactattacctctatgtagccatgttatatggctacatttatacagaagtaaggattagtcttttcctggaccataattgaattttgtacctttaccaatggcgtaaaactgtccgccagctacgtaatggacagtacgtaattcatcaggcgcatcatcaaaaatccagtgcccatttctgaaaactcggtcatcactccatgctccgacaatttcccccatgaacaagttgtgctgtttttcattttctacattgggtatgaccttacagactagccagccagcgcaaccttcaactaaaggaagatcaaactctttctgataaaatagtggaattttactgtttttatggggcgtctcagaatagctgtggcctccagcatataaaaccatttccatctgttttactacggggatctggacaacgtaatatccacttttttctacaagtctgcgagtaaatgcctgtggacctataaaagccattactttattatttcctactaaccccacccaggccgctgccatgacattttcaatgccatcatttttagccgatatcatcgtcgttggcccgacctgcaataaacgataggctttgtttaactctactggttgaattgacataattttctcttttgagttctgataaaaaagtaatatagattacttatttgattgttcgattatatgactggaatagttgcaaattaattgctattatcaaaatacattattgcaatttccacaacaatcatgaacaaacttgatgccttaaagttttttatcatcgcctctgagaccctgaacttccgcgaagcagccgtcaagctgtcggtttcaccatcagtagtaactcgaacagttgctgagttggagaaacagcttggtgaacctcttttcaaacgcaatactcgttcgatctttctcaccagtttcggcgagctatttttaccccaagcgaagcgactgctggaagattctgaaaagttatttcagatggcgaaagatgataatgaaatgaaaggtattgttcgtatcacattacttcggtttccaaatcatgagcaaatattgtatgaactgttgactgcactgcgtccatatcctgagttatttatcgactggcgtttagatatgatgaaacttgatactatcgagcatcgtatcgatataggcatacgcgtagggcgagagcctaatccaaactttatcattaaaaatatcgggcaagttgaacatattttggttgcatcccctgaactcattgcgcgcctgggagcaccaactgatttagaagatcttcgacagcgttatccatttagtggtttaattaatcctgaaacggggaaatcatttgagtttatgagtgacgcagtgaatacttttgtccctcgtcatattgagttttatactacagacccatacgccgaaattcaggctgcattggccggaaaaacggttgtacaatccagcgattttatctgtagggagtacttagcaagcggccaacttgttcccccactgccagaactgcgacaggagaaatggcagttttatttatatcgaccgtaccagctgattactcccaaaagggtcacggtcgttttctcgctattagaaaaaatattacgcaaatatttcacatcaaaataatattttcctcaacgtctgcttctggcacagagctgtccacggctacgatcaaggacagctttgagcgaacagcggaagttcggaacgtatacttacatcgaggcgtcttgagcaatggggtgcaggtcactagcataaaaggcgcgtcaggttttccgtattcgctctggtaccttcattgtccaatgcacttatccgcgacttcgttttctcgatctcatgagagactcaggcgacatcttcagcttttgcgcataggacaatcaccattccgctggtatcgacctccacaatgtccccaggttcggcatgcatgctactgatggagacaggctggtttactgacctgtcccctgtccctaccggatcacataaagcgacctctggtaaacatcgaatacatatatcatgagctgtatcgtgctgacgtccgagttcggcatcttgctaagcatcttaatcgcttgtgagctatgacctcctgacggcatagaatctatgcatctttaagagtacccaagtatagaagcatagctttcagtaattattgagtatgaaggactgatcaaaagaaacaatataggtaatcatcataaaagttatttctctcgtactaaataaccgttatagactgaaatcacggaacgattgaccgaagtgaaatcaacattcagcaattcaattaacgggggagcgaccatatggaaatccacaaccggactccaaatgtatatgacctgcttgaaataaacaaaatcctactttcaacttcaaataatggtgagtcatttgagaaagacttacatctcaatggattcatagaaaaaccatggggatatgagtatagagtttattgtgattctatttttgatgtatggcgccttcatatatcaaagaatctatccacttcaatgcattgtcatatactgaaagacaccgtccttatatgcctaaatggtgatggcgagaccagatttcttgatggtacacatcaggcgttaaaatctggcgacagcatatatattgcaaaaggtgtgttccatcagactatttctggaaaatcaggcatcgaattaattgaagttgaaaacccaagaaacaaattcgacttactcagacttaaagataattatggccggcaaaatatggcatatgaaaagaaatcacaggaacatgatcttttacctcctttgcaacagatatctgcaggcacattgatcagagaacatgacctacacaaattagcatacttctccgtcaaaaatcttgatagaaaaatgttgaatgacgaggatgattttatttttatttcattagatgtaaaaagccatctaatgggaaaaattcatatcctacgagctaaagatgccatctcagaaatgtactgtggtcagaatgtatttttaattaacgtcccgtaacgcaataagaaggaaaatgacatgtctaatccgacacgagtagtgataatcactggtccaggttttcaggatcacgatgtagtttatacttactatcgttctaaagaggaaggatacgatatatctattgcaacaaaggatggaagtgcagtgatagggaaatatggcatcactgttcctatggataaaagatccaaagacaatattaattttgatcaactcaacgccactgattttgatgctgttattctcactggcggtcatgaagcgcctgatagagttcgccaagatcagagagttaaagattttctaaaacagatggtaacacaggggaaagttgtggctgggctctgccatggtccctggattatgatttctgccggtattctaagagacaaactcgcctgcgcttatgttggtctgaaagacgatatggttaattccggcgctaacgtaattgaagcagatgtagttgtcgacgggaatatcataacttgctcctattatgccgaatgtggaaaatttatgcgtcagacattcgatgcaatagatagatggaagcgcggagaaactcttaaagaaccgctggtggtataattcgatgttaatagcaatggatttcgacggggtcctggttgatggagtagacgaatgcatgctaattacatggaatgtattacatgacagacctctcagtgattttaacaaaaatgtacttcaaaaaataccaagtctgatggctaaacggttcaggaaattaaggaattttgtacgtcacgacggtcactttatttcctcattcaccgaatttggtaatgaggctatagataatgacagattcactgccatatatgaatcgattccaactgaagaaaaggaaatatttagggataagttcatccagtataggaacctggcaagaagtatctaccctagtttttgggctgaactacaccgtccgctattggatgtttcaaatttatttgaaacatctaatgatatctatattgtgtcgggaaaggatgaggagtcaatatcattcattctaagtaaatatggtttaaacatacccgcgaataaaatttatgggaggatgaccgataaaaacaagactctcaccttgctaaaatcgatagccttcgataaaaacgaggagattatatttattgatgacaatatccaaaatgttattgatgcattagatcatggcattcaatcattttgggctaattggggatacaacatccctgagcataaattaatggcccttcaaaaaggaattaatgaattaaataccgaggatctcttgaaattagtcaagaaaccctcttaacgcgatattatttcaatttttctgtatgaggagtaataacccatggcgaaagaaatactatgtggttttggagtgggtgtagatgccgttgcaggctggctatcttcttatgggggagaggattctccaagcgatatatctcgcggtatgttcgctggcgaagtaggtactccacgtcttctgaatctctttgaccagtttaatattccaacaacctggtttatgcctggtcattccattgaaacctttcctcggcaaatggaagcagttgttaatgctggacatgaggtaggggttcataattacagtcatgaaaacccaatatctatgtcgcctgaccaagaaagagaagtccttcaaaagggcattgatatggtcacaaaattaacagggaagagacctactgggtatgtcgctccatggtgggaattttctcctgtaaccacagatcttctattagaaaatggcatcaaatatgaccattcactaatgcatcatgatcatcagccttattatgtcaggaaaggtgattcctggaccaagatagattattccaagacaccgaccgaatggatgaaaccgctggtacgcggagaagagacggaccttattgaattacccgccagttggacaatcgacgatattcctcctttcatgttcatgaaaacaaaacccaacagccaaggtttcatgaatcccagggacatcgaacagttgtggagggatcaattcgattgggtctaccgtgagcatgaatatgcgatctttactttcacgattcacccggacgtatctggacgcccgcacgtattaatgatgctcgaacgcctcttaacgcatatgcttggtcatccaggggtgaaattcctaaaattgaatgacattgcagatgactttgccaagcgattgccacggataaaataatgacacggcagccgataaggctgcctgttttatgtatctcaaaccataaatccgctattttttgatagttcgagaattctgtctctgattcctgatacgagtgggttacgtaatgagctatcaatccataccaaatagatagaatttatggggagtctctcatgaacattgacttcaacgatctgacctcctgctatgctttgggcgcataaatactcaggcatcacagtccaaccaatattttctcggatcattctttctaaaattcgcaaatccggtacagtaatagacggacgaagcagtgcaaaaaatcgcgaagaatcctggaaaacctcccttatcaatggtaactgttcatcataagctattagaggaagcttcgacagcgtatcaatcacgtcctcgttttctttgaagttgtctgctataagtgacgctaccacaactattaacttttccattccaatttcagcatatccaaatttttgtttatccggcatagaagttgtgaaacctagttgacaacttccgtccagaagacaggtgtatatgcgcttcctatttcctgtcaaaactttaaatttaataccttcattgaatagttttttcaccaagtacggtaattttgaccacattaattctgctggcccgatgaaagatactgtccccgaggactttcttgtacgtgatctaagcatcgacaacttcagttcaattgtttctaaatctgaagccaccaatctcgccaattcctccccatccactgtagccaccacaccatgtgaacgacgagtaaagagaatacacccggtaaaagcctcaagtgaatgaatgtgggcagacattgcaggctggcttatgcccaaccgcattgccgcttttgaaatcgaaccagctttgtatacttcaacaaaacttcgtaactgaaccagatagctcatactgcgcacccttaagagcttgaagctctccgattacgacataaaatcgaaagcctgcacagtattatgttataaacatgtttcgttaatgcttctacacatattaacttattttaacaattaaaggatcttatagggcaaggatagcatgtagcaatataacgaattgatattattacattttatgtgtgttgtatctggctggcattaaggttccacgcatgccataaggttcggattggcgtgttattttctataaaatattctggggattgataggcgctaaacctttaaattggctaaaaaatcattgtatttttatctattaacgttgacaacctcaactcaaatcgagttatcacaaattccgttggtcagcgaagcggttagcttctgttagaccggttcggactacctttcggaacattaatcatcatcccatggtgcccgtttccatttttcagtcatgaaatcgataaatacacttagcctacggggtataggttctcgccgcgcccggacaacactgatctgagatgtgtttgcttcccaatcaggcagaactcggcaaagtttcccagccctcaattcatcatgaatatcccaagtttctcgaagagatatgccaagccccgccaaactccaggcatgcaatacatctccgttgtcactgataaggttgccagtaacgatgatgtttctttcatgaccggctttacgtaacgtccatgaattgtgtaaaaaacccgggtaagcgaatactaagcagttgtgatttaaaagatcttctggtcgctcaatagatggatggttcttcagatattcggacgatgcgatgagaatacgtctattatttgctatttttctggccagaaggcgagaatcagccagatcccccatacgaatagccagatcgaaatcaccactgtaaagatcctggatttggtcagataaccttaaatcaaagcccaccctcggatgtacttggcagaatgcagcgatcgcaggagcaacatattttcggccaaacggtgcgggcgcagtcaaacgaatatttccgcttaactcctcactatcccctcgggaaagttccttcatctcatccagaacggccaacgctacgcgagccctctcagctatagccctaccctcgtctgtaatacgtagattacgggtgtttctttcaaaaagtgtagtgccaagtgcagtttccagcctcgctatctgcttactcaccatcttggggagtatctgtaggtctcgtgctgcggcagagaaattgtttctgtcgacgacgtgtaaaaacacttcaaggtcgtcatttctcaagtttattttgttcattttggggtaagtgtttgtccgtttaggtctatttaaaggataaatagattgttccacaataagactcaatatgacaagtctgttatgtcgcatgcagtcagaagaattttgctttaagtccccccatatagaggaagttaaaatgcctaaacgcatcctgtttgtattgaccagccatgaccgtaaaggtcaagccgagagtaaagatgccgcacccagtggtttctatctttctgaggtatctcatccctacgatgtactcacaaaagaaggatatgaagttgatttcgtgagtcccaaggggggcaagacacatgttgacggtttagacctcagcgatccggttaacgcctccttttggaataatgattccttacgcgaggcaactaaaaccacattaaaaccctcgcagattgatcctgacgtctatgacgccgtcttctatgcaggagggcatgcgacgatgtgggatctccctgacaatatagagttggcgggtgtttcatcacgaatttatgaaaagggtggcgttgtcgctgcggtttgtcatggccccgccggattggtgaatattaggctttccgataatgaatatctggttgcgggcaaaaaggtgtcagcttttaccaacgatgaagaacgtgctgtagggttgtacgacattgttccattcttacttgaagacacactgaagcaaagaggtgctgagcatcttgcagccgcaaattttcagccacaggtgattgtcagccagagattagtgaccggacagaatcccgcttccgcaaaaggagtcgctgaggcaatgctgcctttgttggcttctattgaaaatagaagagcctgagttatgaaagaacgcatgccttttgttatatatgtctttgcactctgcgcttttgctttgggattcactgaatttgtcacgatcggcttagtttccaggatatcagctgatctaaacgtcagtgtcagtcatgtaggtacagcggtgacagcctacgccctcggtgccgtaattggtgctccgggattaactgcgttggcaacacgatggcctcgtaaaagattattacttgttgctatgggcctgtttacagttggcaatggtatcgtcagtgcgtctgagtccctaacgcctatgttgattgcacgatttgcttccggtttagggcacggagtgtttcttgctgttgcttcaagtgtggcaacccaactggctgggcgacatcgtgctggcgccgctgtttcggtcgtttttggcggtcttacaattgcgttggctttaggcgtaccacttggtacctacatcggtagtctgttgagttggcagtctatattcatggcagtaacggcaagtggagcgatcggtttcattggattggcaatgctgatgcccacggatcaaaatgatccctccttgcaagcaaatgccatggacggtttaaaagccatgttcaacccactgctgcttgcgggagcaggaattacagttttggcctatgcaggatcttttgccctgtatacgtatatttccccgattctacttcagataacgcatgtagacgagcgtacgagtagtttgcttatgttggtctacggcgtgatggccgctatcgggaatgtctggggtggtcgcctgactgacaagcaaggtgcagaccgtgccgtgatgacaattcttattggtctggcgatcgtcctctttgctatgtggttctctgcctcatccttaatgttaatggcactgtttattggcttgcttggggcattgacatacgcagcggttccctcaatgcaagcaagagtgatagggctatctcacatacatgcacctgaagctccagctgtggcagcaggactgaatattgccggttttaacggagggattgcattagggtcactattggggggtgtagcactggatgttactggtcttacaagccctacttgggttggaggcggagtagtaatcgttgggattttgtggatgttattacaaataaattctaataaaagacgcaccacctccgattattcctgatagtacacatagcattcaaaatggctcagtgaacaccaaatcactgagccattttattttacctctttgaaaaatgtcacaaccaaacacaggtttttttattttataaaatcaacctatatcattctgatctatttcatatcaatcagaattttaaacatctttcaaaaacacagcgaaattcatcagcaatatcattgtgtgaaaggagatgtattatgtcagtcaatccaactttcctaaacattagagatggaattccagactggataactatcagggaggcggtaagacttctcaatggattgaatgggtgtaaaataagaaaaagtgatttttatcgatttgctctgcaagggaaaattcggctttcaatatattttcaatccccagtaacattgaggaaaattaaatcacaaaatcataaattaaagctaagaccaataaaaagctcgtcaacgatgaaatcattcacgcttgccgaaagttcctttgtcagcgaaaacaatttaactttcagtactgaaggaagatatatccatcctgtacaaagagtcattgacacaacattactcggctatgaatatgtccttatacagcgtttacttgcacattcattaaagataccatcacctgtaacaggagcaacgtcgaataattatggcattaccgtttgtttattgggggaaacgtttcaacttttcgaaaagatgacatggcatgaaaaaatcgaacgacacgtaaaaaggctacctaaagatatttcatcagatgattacgaagatataatactaaacactacaaagaaagattcgcataaatattattttcctatgcatgaattaccgagtgatgcctgctttgtcctcagaaaaagcgaactcgataagttgatcaacaaaccaatcgaaaaagaaatgcttccaccatctccaactcggatatccacccctctggcacgcctcttctggctggcctgcaaaaataatgaaactatcagtccgctaatcatgcaaccgtataaactattgtccatttttgaacaatgggcatctgaggaaggcattactgatcgattcagtggtgacacactgaagactgcgcttgagcgcggctctcccccttccataccaatacaaaagtaagatgatctcccttagctatgaaaacccgtattaaggattgtattttccgtaatacgggctcatcgactttctccacaccactgctttgtgttgtcgtgttatctcccggctagtgctatatctgccacaggagaataccgtgacatctcatcagttattgcgtctgaaacaggttgaaggaaaaacgggcctaaagcgctctcaaatctatctgtatatgaaagacggcaccttcccccgctcaatcaagattggcccggccagtgtcgcctggctcgaatcggaaattgacgaatggatcaatattaaattagtccgccgctcaataggctgaagggagaaaataccatgattatcccatcacttaattacgccgtattaaccgatgccctgcatgcattgaaggatggcaacattcgttactgtgaatcgctaggattcactttcgacgaaatgaatgccctcaaccaattatcactagacgagctgtttatcatgagtcgggagtctgcgcagtttttggctgtgacggttcatcacgacgcattacacctgcttctggctaaatcccgtgaggaggtgctgcagcaacagcgtatcaaccacgccatccgactgggtgggtcaattgcgctactcaacaagtattttggcctcacctccaacgaagtttgccttcgccgccggttactgggcgtccgtgtaccttatggccggacgcctgagccggacgaagatacggatgcggccatctggcggcaatggcaacaatgccgggtggccaatctggaatcgaccgatgcgctggtcgccatgatgcaggtaacgcaaaccctgctggcgaaagtcgaaggattgtcactgaccatcgtctggaagcgtatcgaactttgcgagcgggaggcgtcagaccggagggccgcacatgccggatgagatcgaccgcgatcaggaatttaatgagcaacgactggtggagatgattgaacagagccgttttaagccagggtctacgccatcattattccattgtcgcgtatgcggtaagcccattcctgaaaagcgacggcaggcactgccgggcataaccacctgcacggaatgtcaggaaaagcttgaacgccgaagacgttaataatggccacagagacatgcaggaatatttcccctgcatgtctctatcattaactataaatacacagtcgtctttattaactatttcacttcctgttatctcgcagagtttaccccttccactgctaatttatctctctcattttaactttgaatttatcgtgtatatgccgccccggatatctgatcctgaaagcgtcattacataatagttacccgtattgacgttaattcgcctgaatcaggcattgctctttaaaaataaggtttgggctgtcacgaaaccacaattcagggtgccgctgaatgttctcgctgacccgttaaaaccggaatgcagaattgggatgtgacatttatttaactcaccgttgtttttattagaggaggcctcatgcgaaaacccatttatcacgtatttgtcacccaggaaagtcggcccgacccagagggtgaaacaaacacctggtggacgaaagtcggtgtggcttttgcccatcacggtaaacccggcctgaacgtggtactgacacctggcattgccgtttccggaaagctggtgctccttgagcccagggacgacggcgatgcgacacaggatactcaggccatttaaccgcccttccccctttttccggtcctgtgccgtctgatggcggtacgcgttgcccggtttaccgttccgaggccaccatgttttccacctccgtgtttctggcggcggccatgcagtgcgccgccagcgttcacccgtctacggcactcgatgtggcgcgggtcgaatccggtttgaatccgtatgccattgctgaaatcctgcccggtggcaaaggcgtgatttcacatttccccgccagcaggaatgaggccgtccgcctcgctggacggctgaaggcacagggtcgacgctattcggtcgggctgatgcaaatcaccagcaccaatttccgtcattacggcgtgaccgcccgcgaccttcttgccccctgtaccaacctgtccgtctttgaacgcatcctcaccgactgctaccgccgtggcggctccctgaagcgtgcgctcagttgctactactccggaaatttcacgaccggccaacagccggaatccgcgtttaaccagaccagctacatccagcgcatcggctacgccttgccgtcaacgcgggaagaccggcagcgacctcccgccgaaaatctcatgctggcaatccattaccccgccgccgtcatgcgtggcgagcttaccgataacgccacgccagttctgacatccctgcgctaccccaatgccgtgatacgcggcgcgttacccattcccggcccccaggaggaacattgatgaaacgaaaacagactgactggcccgccctctcttccttgttaatggcaagtccggtgctggcagcagacagcggatttaataaagccaatgagacgctgagcaacacctctaccggtctgctcggactggccgccgtcaccatcacgctggccaccatgtgggtgggatacaaagtcttgtttgacggcaagagcctccatgacatgcgcaatatcatcattggcgccatccttatcgtcggcgcgtcaggtttcggtgcctactgggcgtcataagggaggtaacgatggctacgctgaacaaagcgctgacgcggcctgccgccatagccggcattcccctcgtgccgttcgtgatggtcagcggggccatcgtcctgctggcggtctatgtcagctattacctggtattactgcttattcccgcctggctggagatgaaggtaaaggccagaaccgatattcactatttcgggctgctctggctggcctttaaaacccgtggccggtttggcaccaataaacattttggtgccaatgccctgctggcaaaccgttatgacgccgtcgacgtctcggagtttattgaaaagatgaagttaaacgagcgcgttacgctggagaaatacattccgtattcctcccatattcacccgcacgtcatcagaaaccgccaaggtgatctggttgccagctgggagctggagggcaccgtttttgaatgcgaggacgaacatcacctgaccttaatggcgacgcatctcaataacgttattcgggcgtatgaaggcctgccggtcactttctatcttcaccgtatccgggaaaagtaccacgatgcctttgacgcgaattcaggcattcccttttctgatgaagtgacccggctgtattaccagccgatccacggaaaaccgttctggcggcaccggctgtttttcaccgtctgctacgcgcccttctctccgctggagaaaaaggccatgaaggcgcagccgtccggtaaacgcaaagcggcgctggatgatgccctgaaagtgatgctggaacaccgggaggcgctggtatctgctctgtcccgctatacggcgacgccgctggggatgtatgaagacaacgggcgggtgtattccgcccagctgtccttatatcaccgcctgctcaccggccagtggcaaaaggtggcggtcacgcgtgcaccgttttatgaaacgttaagcacgccggatgtctttttaaccaccgacaccgccgagtgccagacagtcggcggctcccgctttttccgcagcctggaaatcaaagattactcgcctgaaaccgcgaccggcctgctggacgcgctgctgtatgccgaaagcgagtatgtgctgacgcagtccttcacctgcatggcccgcgatgaggcgcagaagcatattcgcctgacggaaaagcgcctgaactcggcggacgacgacgccatttcacaacgtgaagagctgattgtactgcgtgacctgatccagtccgggcatgtctcgtgcgggaaataccacttttccctgctggtatcctcagacagccccgaccaggtggtcaaggacaccaacgcactggcgcagcctttcgccgacctcggcatcatgacggcgctgtccacgctgtcgctgcccgccgcgtatctggcacaactgccgggtatctatacgctgcgcccccgtctggtggccatcagcagccagaactttgccgacctggcgagcctgcacaactttcattcccacaagcggagcgacaatccctggggtgaagccatcgcgatactcaaatcaccgggtggtggcgggtattacctgaacctgcacgacggtcaatgcagacggaatgacttcaacgaaaaaacgccgggtaatacggcgattatcgggaaaaccggctcagggaaaacgatgctgatgaccatgatgcagcagctgatgcagaagtaccgcaatccggcgaccttctccgcctcaaccacaatccagcggttcaccacggtgtattttgataaggaccgggcggcggagatggcgatacgccagatgggcggacgctacttccgtatccgtaccggcactcccaccgggtttaacccgttttcgctggccccaacccggcggaatatcagctttatcaaacgactggtgcgcatgctgtgcggccgcaacggcaagccgctcgatccgcgcgatgaggagcggatcagtgccgccgtggataccattatgctcgactacccgccggaataccgcaagttcggtatcacccggctgctggaagtcctgccggagccgccaacccccgccgcccgcctcaacgggctacgtattcgccttaaacagtgggcgcagggcggcgagttcggctgggtattcgacaatgaggaggacaccttcaacatcagccacgttgataacctgggtatcgacggtacggaatttctcgatgatgacgatattcgcggccccatcacgttttatctgctttaccgcgtcaccggcctgctggatggtcgccggctggtgatgttcatggacgaattctggaaatggctggccgatgtcgaattttcccgcttctcgctcaatatgctgaaagtgatccgcaagctgaacggcatcttcgtccccgccacccagtcacctgacgaaatcgtcaaacaccctattgctccggcgattatcgagcagtgcagcacgcagatttttctcgccaacccgaaggccagccgggcggattacgtagaaaagatgaaagtgcctgaaagcgtgtacgacatcgtcagaaacctcgatccgggtgagcgctacatggtggttctgaaaacgccgttacgcgcaggagaaacccggccttttgtggcgatggcgaaaatggatttatcgggtctcgggaaacttaccaaaatgctgagcgggagcgaagacaacctgaaactgttcgacaccctgtatcaggaaggaatgcagcctgatgactggaaagccgccttccttgaacaagccctgtaatattcatgacggaggtaatgaaaatgcggttcagagatatcatactggcgttatcgctgtttatttccacccaggcgatgagcgccggaataccggtattcgacgccgtacagaataccgaatccatgaatcagtggatccagaaactccagcagtggcaggaaaccgtcacccattacagaagcgaacttgatgcctacaagcagcaattagccacagcaacgggcgtgcgggacgttcaggcatttctccgcgaggccaaaagtctgaaaaccgatattgataatcttcgtcaaaacggtatttcactggatgacctgctgagcaaccagagcgggtcatattcttctgaacttaatagcttgtataacaaatataaaacattcgatacctgtaacccgtccagctcttcacaacgctatctggacagctgcaaacagatgatcctgaatcaggccgtagcgatcgaaaatacgtccgaggttgaaaacaagatcacgggtacgctcggcgatatatcagatttatcagaccgtattgctaatgcgcaggattcgaaagagtcacaggacctggctaacgccatcgcggccaaaagcgtacaattgaatgcgctgaccagccagtgggagatgtcagtcaaacaggctgaacagcgagcaacgctgctggaacagcaaaaacagaaagcctttgagcaacagcaattaactgcgcccgttgccgatctgaactctctatagggaggttaacatgttaaaactcgtattaaccttatgcgtcatgtcaggcattctcgtcttatccggttgtaaagagacgaaatcagaagcctggtataaagaacatcccgatgaaacctataaggtctatacgcaatgcctcacggatggcgaggcaagcgacaactgcgagtttgcgcaccgggcagcattaatgtttgcccagacagggaaacccgacatcagggaaaaattcgagacgctgtttcagcaggaagcccaaaaaagaaaatccgtcactcagtaatattcccgccaacaaaaacagggtccctccctgtttttatcccctgtctgttcctgactaatgagaggcaccatgtccggtggtatttttgttggtatggacaaaaacatcatggatggactcaatgccgtgttagaaggtcagtcttctacctacggcaccctaatcagtgtgattatcgtcagttccttcaccctgtttattacgtatcgcgggtatcagacgcttggcggcaaactccagacaccggttgaagatgttgtctgggatgtggggcgcatgttgctgatcaccacctttgttttaaaccgcgatggctggctggatgccatcattgcggccattgaagggcttaaggacggcatcagcggcgatgataatgtctgggcgctgctcgacacggtgtgggaaaaggcacaagcgcaggggcaaacgctgtttaatctcgatacctccacctacgttaaagtgaatggcggttttgccgaggtgctggtctggggcggtgcaatcgttctgttactggctgcaacctttgtcaaccttctcgccgaaatcaccattctgttaatgaccaccaccgccccactctttattttctgcctgctgtacggttttcttaaacccatgtttgataactggctgaaaacaatatttaccgcaatcttaacgatcatgttctctgccctgtctgtccggatcgccatcaactacctgaataaaatactggatgccgccacagcaacgtctgctgaaagcaatatggtgaccctggcggcgcaatgtttgctggccgggattgccgcaggcgtcgtggtgtatttttcagcgaaaatagccactgcgctgagcggtgccgccgtacaggccgtgttacagggtgcagccatgagcggactcactgggctggcgagcaaatctgccgacgtcgccagacccggcataaaggccgggggcagactgaccaccaaaggtggcatggcggcagcagcgacaaccggcaggttcattgccgcaggtgcgggcaaagccgcgaatgcctggcagaaacgtgccaccgccattgaaagcatgaaacgccagaatcagcagcgtcaccgttaatcctcccgaccgctaatttcttttctccgtcacgccgtggcctctgccagcggtgcggctttcctgcatttatccgataagaggcatccatgaaattcagcatcttgcttctggtgctgtacgcgctttccggctgcacgcagcatcacggcgacctcccgcctgtgtccggcgatccccagccggttaattcccccgccataatccaggagctgactcaccatgtctgatattcagcacatcatcaatgtctcgcgctcttttgaatccatcctgctggaaaaggaagagcgttcccgcaaaaccgcctggcgggtggccgctgccgggcttattctggctgcactggcaattacggccatgattattctgctgccgctgaaaaccactgacattgaattatggtcggtggacaaacagaccggtcgttatgagtatatgacccgcattaaagagcgggatattgcgtctgaaaaagcactggcccattcactggcggcacactatgtccgactccgcgaagggtataattatttctccctccagcgtgattacaacgacgtacagttatttaacagcgacagcgtgaaccgggattatctggacgggtttaacggcgaccaggctccggacgttatttttaataaagccgaatatgtcgtctatatcgacattatttctaatgtgcatgcgcctgccaccggaccagataacctggccacactgcgtatcaagcgcaccctccgccgtatttctgataattcagtgaaaacggatttctggaatgtccgcctcacttaccgctatgtcccgcatcagcaactgacggacagtcagcgggaagtgaatccgctgggctttatcgtcaccagctaccagcgcgataaagaactgaggagcgaatgatgctgaaaaacatcctgctcctgacgggcttactcgcgtcatacgcggcatggagtgccgccaccccgcgcggtagcggctatgacagccggatgcagaacgtatcgtataacagtcagaacgccacggtcgtcaatacccgccctggctacgtcaccacgctgctgtttgacgacgatgaagctgtgattgatgcgcaagcgggctttcccaaaggctggacggtaacgaaaagtgataaccgggtgggcgtcagcccgaaccccatcacccagccggtgacggacgccagcggcaacaacatcagccaggtgttcctgcccacggcgaaggactggaagaccaacctcttcgtggtgacctcaaagcgtgattacagcctggagctgaacgtgctggaccacgattcccccgcgcaggcgttcgttatccgttaccactatccggccgaggttcgccagcaatccgccgccgccagcgccgcaagtcagacgcagcagcgtgaaagacaggagaagcagcagatagcagcggcattcggacaggccagcacgccgcgcaactggcgctacaccaaacgggtcgccgccggttcggcctccatcgcaccggattttgcctgggacgatggtcgttttgcctatatcggtttttcccccatcagaaccctgccttccgttttccgggtggttaacggacgggagcaggcgttcacgccccggacagttaagcagggtaattacaccgtgatggtggtgccggcagcgccgcaactggtgttgcgttacggcacctcggtggtggggatcgaaaacgacggattcgggcgcatcccgataacccgcagcgacaccgtttcaccgtccgttacgctggaggccagatgaccgataaacctgtcccggacgagccggaaaaaaccaccgcagagcgggaagcggaagcccgcgaacgcgcccgtgcggcaatggcgtatcaggagccagagcagaaaacaccgcccggccagccggaagtgacccgttttcgtaaggcatccggtcgccgcacgctgatcgtcagcctgctgagtctggcgctggtgatcgccctggcatccggcggcgatcgtcttttcagtgcattgaaagggggtaatgagaaagaagcagacaccgcgccgccgccctctgccgggaagacgctgcatgagcgtcaaaatctgggcatggacagtaacccgtttggcctgttcgggtcgcacacacaggaccgaacagtccctgcccgtcagaccgtcactcccgcaccgaccctgccaccgaccccacccgccctgaacaaggcagccgcgctggctaacgggccgaacaacacccgaacaatgccagccgataatgtacgcacgtccccggatgaaccgcgcagcaacgcagaaacgtccgacaatcggtcatcatccacgacgtacacatcctgtccgtcagtactgacctggggaaaggatggccgcctgcgctgcccggagactgccgcgccggaaacgggtaacaacgacaatccgggcatcgcccgtgtcaccggcgtcagacgactgggtcttgatcctgatctctatatcccggtggaccgctatatcccgtgttcgatgatgtggcgcttcgtgtccaatgtcggggggcatatttcctgcctggtcagtgaagatgtttacagcgccagcaaccatgtgacgctgatcccggcgggaacggtcgcccgtggcatctaccgcactggggcgctgcaacacggacgcagccggatgtttgtgctatggacggaactgcgtacgcctgagcccggcagcctgcaaatcccgctaagcaatacgcaggccagcggcccgctcggcgaggcggggatctcaggctggatcgacaatcacttctgggaacgtttcggcaatgccctgatgctcagtaccgtccaggacgtggcagcggcggcgtcggatgctgccccggggaaagaccgcaataccgactacaccgaaaacacccgcgctgccacggcggaaatggcgaaaacgacactggacaacagcatcaatatcccgcccaccctgtacctgaatcagggtgatgtcatcggcatcatgacaggcaccgatattgatttctcatccgtctggcagctgcgactgaaaaagaggtggtatgaacgctgaaaacttgtcgctggattttatgaaaaaccagctgtttggtgattttattgcgcaggacggcctgacggaaattgccgttaaccggccgggtgaactgcataccaaaatacgggggaaatggcgaacacatgaagccccgattacgctgcgccagtgttacgcctttgccagagcgctggcgtcctggcaggacgataatatcgacgacacctcgccgatcctttccgccacgcttgaatcaggcgagcgcattcaggccattattcccccggcctgtgagcgtaataccgtgtctattacgctgcgcaaaccctcattcgggcagaaaacgcatcagtcatggattgatgcgggattttataaccgggtgaccggtaaggagcggacggaaggcaaagatgttgaactgacgcgctactatcagagtgaggatattccccgctttatggaaaaagcggtggaatacggcaagacgatttttatcgtcggtgaaaccggatccggtaaaaccacctatatgaaaacgctgctgcactatattccccggcacctcaggctgaccaccatcgaggataatcccgaaatccggttctatcaccacaccaactatgtccatctcttttatccggcagacgccggggataatgccattgtcacgcccggcagactgatacgtgccaattatcgtatgaaccctgaccgaatattactggctgaaattcgcggacaagaagcctgggatgcgttgaaaatcgtcggttcagggcatgagggattgatgacctccctgcatgcgggcagcccgaaagaatgtattgaagggttaattgaccgctgttatgaaaatcccgactgccggaacattcctttcgacgttctgttacgcaaggtgctaaaaagcattgatgtgatagtcagcattgatattcacggtgacatacgccggatgagtgatgtttattttaaaccccttcatctcaatggcatgagaggtctattcaccaaaggactccaataaataacacatcaagatacgtaaccgtcgtttaaatatgaaggtgaccgaaatgaaaaaagtaataccctccgcattattattctgcattatggcgtcatattcaacctccggcatggccgctgacgcctgtgaagtggtgttatgcatgtacggtaaagccaccgggaacggcggcgacaacgaatgccattctgctgaacgcacattctttaatatcgtcaaaaagaacaagcacggttttctgccagaccatactgccgatgccagaaaatcatttttacttgagtgtgactcggcagacccggcaattatcagccagataatcagtaaatttggccgcatgcgtggttaattagcggaggttatctttatgaccaaaccgggttttattcagcatccctggacacatcagcgtggggattccatgcgcgcagcctgtgttattgagcacattgaaaatgaggcgatgcacggatgcggcctttattatgaaatttatcactaccgggttgtctgccggttattgcagttgctgcaaacgctgaacgccaccgacagaataacgctgacagaggaagctaaccggcgtggctttacgctggatgaaaccagcattaaagaaagtcgtcagttttattccgacatcatcagggaaatccacgagagccaatattaacccctgccttagttttattctcagctctcaaacgacagaggaatatttcagccgaatcaggcttaaggcgtggtggttttccggtttttacggcccggcacatttttcacgaattaaggagtgaagaaatgcaggccgtaaaaatgaggcagcagacagaattattttcgcggattaaggagcgaaaatagttcaggcgccgcgcctcaccggcaaacagccgcgcccacgcggattttgccggccggggggagccgaataaatttcgccgccccagcgagcgaaaagctgtcgcccacgacagcgctttatttggggggcgtcagccccgcacaccgtcgcagctaagtctccggccaaaagccggtagcgtggcgcgaccaccctctttaaaggtcagcttcccttttattcccgctgcgaggaacgagcaaagggaagaaaaaggcgaaagcgaccgtcttaaagagggtggtcgcgcgtagcgggcgacggtgtgccgcctttgcccctgggggttttgacgcggcgtccagccacgacattacccccatgcgacaggcaataagggcgtccagcccgcatgtactggcgcacaccgtttcgtgcagggaagcatgctttcctgcatatggccgcgcagcggccaccttctttgccccatacgctcgccccacgttttcgcccgacaccgtggggcgaactgatggggcgatgtcatggggcgaatcgctgacgaaggaggcatcatgattttaaataagcttgccgcttcactgtcgccgatagtgaacgggatgctggcactgctcgcttttgtgcaacagcaacaactgatgctggcgttattagcggggctgacgatgccgttttttgtatcaatgaaaagcgatgaacggcagaaagctccactctggaaaaagctgattattgctttttccctgctgtgttttctctccggtacactggctccgatagttatcggatcctttcagtggctgtataacatcagactcaccagtgataattcagcactggcgtggtcagtacggattgctttcactgtaaccgggattatttttcatattatgcttcgccgggtattaacgccggagctggacaggataaagaaacgccttgttaaaaagactacccttgaacgggaattacgtactgatgtccgcaccgtaaaatcccttttgccggaaacactgcattatgacccgctgcattatatcgacctgagtaaagggctatttatcggcatggacagggagaacgaaccaatgtatctcccgttaaaagactggcagaaacagcacgcggatattatcggcaccaccggagccggtaaaggggttgccaccgggatattgctttatcaaagtattttggccggtgaaggtgtgtttgttatggaccccaaggatgatgaatgggcaccccacctttaccgcaaagcctgcgaggatgcaggcaaaccttttgccctgattgacctgcgtaaaacccaataccagttaaacctcattgaagagatcaccgccgatgaactggaagagctttttgttgccggtttcagcctggcagagaaaggtcaggagtcggacttttatcgcattgatgaccgaaaagccgcccgtatggccgcacaatttgtcagtgataacacatctgcaacaatccgtgatgtttataacggtgactacgttcagagcatcgccgaaaaaatcaaagcctttttcggtaagattgaggaactggccttactcaatgccattaattcaccggagggtttttcactcaaaaaaatatttgatgaaggtggctgctgttatgttatcgggtccatgcgaaacagcaaaattattaccgcccagcgcatgctgctggttcgcctttaccagctggcagaaaggcgcgatcgagtaacagacgtcccccgccccattgctatttatctttccgaactgaaataccatttatccaggccagcgctggaaggtttaggcgcggcgcgggataaaggcgtacacattattatggaccaccagtccatcgccgatttaaaagactgcccggcagatttgaaaggtgacgccgttgtcggtgcggtcgttgaaaatgccaaattcaaactggtttaccgggttatggacccggatacagcggactgggtagcgagaatgtcaggcacgatcctggtggatgacgaactccgtaaggccaagacggataatatgctgacggaaaccatcgacagtgagcgcacaatccgccaggccgaacgtttctttattgacagcaatatgatcctgaacctccccgattttgtcagctttatctttacgacaaaaacgcaaccttctgcatcattaatttcaccgataaaggtcaaaaagcgccggttaaaaaccttttctgtttcccctgatattgccgcagcggcggcacctgtgaagatcgcactggattttggcgacgatgataaaccaaccgcgctggatgagatgacatcgcatccggctcttttcttcgacgaaaacgaagtcaaaccggcaaagccccaacctgatgaggaagaacacctgtccccgctggatttttaaggagcgcttatgctgatttcgacatataaagagcgccagacacgcaacagagaaaaaataaaacaactgctgaacttcctgaaagaagaaacctacagcgattttaaaacgctgatgctgctatttggtttccgggatcataagtcgctttattcgctgctggcaaaaacagagcgaatggggttaatacagaagcatgcgcttgaatcacgaacaatgaagatttcattatgggggatcaccagcgacgggctggccatggtgctaaccccgaatgataaaatctttcctgctcgatttgaaccatcaaaaatcaccggctggacgctggagcaccaccttgataatcaggccgccaggattattctggagaaaaaaggcgcttcgggatggattaacggcgaccgggccacctttgtcagccagtatcaggtaaaacatcgcccggacggattactgacgctgcccgacggtaacgttattgccattgaaaccgagcgcagactgaaaacccgagcccgctaccagtcgataattgccagccacttactggcccgtacctgcaagcagtggatttacgttttttatgttgtgcccgatctacataagaagcgtgcgcttgaactgctgtttgacagcatcaggcatgtcatcatcaaccatcagcacgtcccacttgaagaacgccaccgtcgggtgtttcgcatttatacctttgatgaactgaaacacctgtcattaggcagctatacgtaagcttttactcaggccatcgtgatggcctcatcggcctggcggcttaccgccaggcggacgatttttattccactgcgaggcgcagactgttcggtactcgctgtgctgcgttccgcctcagtcagcgccttgcagcgttgcccgttaaaactcatataaccgcattccattgcggttgcctaatcccggtctcagagtttatccatcaggtaacgatgtgctttagaggctgcgctggccgctttgaaaatatagcgcttgtcgtttttcagcgctttcagccaggaagcaatatagctttcatgttgtacctctccctcaattcccaaatccgccatcagaaaggcacttcccagttccgcgacaagttcttcctctgcataatccgcactgccaaacttccctttcattttacggttcagatgttttttgcccccactccagtgaaccagctcatgcaggcctgtagcgtagaagttagcagcatccgaaaacagatggcgctccggtagccagacttcatcagttgaagggctgaaaaaggcgttttgtcctttctcgatgatgtttgcgccactcttccgtaacaggttctcagcctgcggcaccgggccaaaggttgcttccggactgcccgtttcagttgtcagaggcaaaccgtcgatttgctgaacgttaaacacggtaaaggttttcagcatcgggatatgttcaacgtctccggcatcgttttccttttcgagggtcgtatagaaaatggctgtagtgccatgttcccccttgcgaacctgcccacttgcagcctgtgcctgtttgtaagtcatccagcgtgaatcgctaaaaccctgttttgatgcgctgcaccacaacagcataatattaatgccgctgtaagccgtgccagtggcgtaattagatggcagtccagacatgccggatacacgcttccacggacaggaccacggttttacaccggcttcaagtgctacaatgatgttctcagtaacggtctgataaatgtcggttctggttttagaaaatttcgtttttgaggagcctgactgctccagcggggatacgctggtcgccgctgcggtgttaggggcgcttgtccgggtggtatgcagggatatcgtcatggtttttctccgtcagtgtgtgattttcgtcttcgtatcgcctgacggttcgctttcccgacatcgttccggcacgcaaggacgcagcatgcgtgccatttatccttgcgggacgggttgtgttgggaaacgattaaccggaagccgatagaggaacgaaaagcgcacaggagaaaaaactgcccctgcatagccgggcctagcgccccttactccgcagtggtgaaaagtagatttgtggtgttgagtctgagaccggcactgacaggaacttcatgtaggtgttagcatgcttttctgccgggcgagacgatcctgctaaccgggggcggtttgttcttaaattgtctcgttccggcattcatcactaccgggtccgggcagtctcctcattgaacgcagcgtacagtctgtccaccaccgcccggatccggggtgagagatttcttgaaacaggccacagcgccgtaaccggggcatcatactcgggggtcgtaacaggtataatcctcagttgccctttagcgatttcgtctccggccagccatgttgacaggaaggcaatccccataccactgacagccgcatcccgcagagcttcaccgtggctgacaatgtggcgaatagtgggttcaatcagggttagacggccattttcatccagcactttccagggtaatactctgccatccctggaaaagcccaggcaggcatgtaaaagcagttcttctgcgctgccaggcaggccgtgacgactaatgtatgcaggagaagcgcaaatgacagaacgctgagtggcgatttttcgcccggaaagactggcagagtttcctgtatcaccgagccgtacagcaagatcgatattttcctcgataagatctacccggcgatcggtgaaagtgatatccagtctgagctccggatactcagtacacagcgttgcaaggacaggcatgacgcaaatcctgccatatgatacggggaggctgatgcgcagcgtacctgaaaccacctttttgcgggacgccagaagagattctgcttcatcaagctcatccaaaacgttgaggcagctccggtaatacagttctccctcttcggtcaggttgatgcttcgggtggtacggttcagcagtttaacaccgagccgttgttcaaggcgggcgacatgtttgccggtagccgattttgatacgcccatccggacggcggcggctgtaaagctgcctgtctccacggtatgcacaaaagcggccatgctgagtaactgagaatgcaggataaatgccattcaattgtctccatcagggaggaaatgtatttcctttatatcgcgatacacgccgtattgttgtcaataagatgatttttccgacttacaggagaaatcactatggctcaaatgatgaaacgctggcagttgtcgtctttcggcactgaaaacctccacctggcagaagtacctttgccggaaccaggacataacgagttgctggttaaagtctctgcggtctcccttaactacagagataaactggtgctggaggggaaactgctgcctgacctcccggaaatgcctttcacgcccgtttcggatatggcgggtgttattgtcgcaacggggccgggtgtgtcccgtttcactacaggaaaccgggtcactggaaatttctggacgcagtggctggatggcgatgcgccggaagatatggtccatcatggccgctcactgggcggtccgctgcccggaatgctggctgaatatgtcatactccacgaagatgtggctgtcgcctctcctgactcgctgagtgacgaggaggtttccactctgccggttgcggccctgacagcctggttcgcgctggtggaaacaggaaatctcagaaaggggcagcgggtgctggtccagggaaccggcggtgtggcactggcagggctccagctggcgcgggctctgggcgcggaagtgaccgttctctcccggagtgaagaaaagctacagcgtgcaaaggcgcttggggcatcaggtttaatcaacaccagtctgacaccggaatggtcattgcgggttgctgaactaaccgggggatgtggatttgaccatattctggagcttatcggcggggataatttgcgccagtctgcggatgcccttgcgccgggaggcaggattgctcagattggtttccttaaaggcaatgagatgattcttcctgccttccccctgatgcttaaaagagcagttattcaggggattaccgtgggccaccgtcgggctcttgaagatttatgtcagactgttgaccgccatcagattaaacccgtgattgataaaatatacaatttcgctgacgcgcaggcagccttcacacatctggaagaaggaccattcgggaaaatcgtcatccgaatcggttagcatttggggcgtaaacagaaaaagtctactatcacgtatggcatgcagggggacattgtcctcctcattttcttatggtctttttacacgttcgctttcaataagagacatactgatgagcacttacattactctgtcttcgattatcaccgctgctgaaaggattaaaaaatcggtcattcggacccccacggttttgtctccgggattgtcggatatgctgggaagaaaggtgtttctcaaactggagaatttgcagacgggtggctcttttaaagccaggggagtactgaacctgctttccgctttttccggtaatctgagagattaccgtttcgctgccgtcagtggcggtaactttggtatcgcagtggcagaagcggccaaagcgtttgatataaacgtgaccgtgattatgccagaaaacgccccggcctcatccattgaaaaaatacgccattccggcagcactgttattcttgaaaaagatgtcagctccgcgtttgaacaggcaaggacgcttgcagagcagggataccacataattgatgactgtatcgatacactggttgcggaaggatacggaacccttgcactcgaactgatggaagattgccctacactgaccgatttatttgttgcggtgggtggcggtgcaatgctggcaggcattgcgacggtactcaaatcccgtaacccagacatccggatatggggagtggaaacggagggagccagttcgatgtaccaggcattgagggcaggaaaccccgtcaacgtggatatcacttcttccatttcaacccttggcgtccctgtgattgaccgccttatgcttgaacacgcgcagcgctacattgaaaaggtcatcaccgtatcggatagcgacgccatacaaggcatgatttcattcggcgagcaagccaggcagtgggttgagccagcagccgggacgcttattcccgcagctgtcgctgtaatccccaacctccccaaagatgcgatcattgggctcatagtatgtgggggcaacgttacgcaacgagaaatgaatatatgggcaaattgttgaggtatttgttaagtagtctaagactattgcgcataatgttacccaactcaagggtattttgaaaaaattagatagcgataatgggaggtgaatccctcccaatacgttacgttaaagagtgttgggggtttttaagtccaaaagtaaggatacatcctgtttaaatttatcatgaaagtctttgggtaaaccggcagatgagtataaatatcctgacgctgctatcataaattgaacaatcctatttgatcttctcaataagatggatagctgaaaatctttatatccgtcactctcagacacatatcttaatgaaagctctcggcatggtattagtgcctcttttatgtctacaggtgcctctaacaagcttctggaaacatcaacaaatctttcccaacctggtaactcaagctcccctttttttcctccagaaacttcctgaactgcatttttaaggtctctgcgctgaatataactatcacggccgccccaaacataatagcgcaaaactttctcatactcagactgattcatttgaacatcaaaaacatcagctaattgagaagtaattggaatcataactaataaaaaacttagaacgatagagctgtaaaccgacatgtgttcatctttctcaggattcagctctcctttatttagcctaacaatacccaataactctctaagagattttgcaaaatcaacttcgagtggaatgcgagtattaacgtactctcctaaacttttaagatgatcatttttttcaaaaatcaaataataggaatgccaagatgaaatatgtgtggagtaatttttcctatccaaataatttatatttgcagattcagcatatttttcaaaatcactttcctgaaaaagatggacatttaatgtctttgcactaacacgatgcgcttcagttgctttctttgctaaaatgacatacgactcgttgcaaccaatatatgccattacaccagcggcccagaacgctctgttaattgcactcatcttaccaacggttttacaatcaaacagggttttttggattcccccccgcctagaaacctccaatcctaaaacgtcaagatcagtaattactgtacgaatgtctgaaatctctctgacgttattaacaacaacctcaagataaggaagaattccgttcgatatgcaataacgtatagctttctctttttgagatgtatctttatccaaagcagccataaataacccttaaatattcaaatttagtagcaactgatccatttcatgtttagcttcagccactatttgaacttgctttctttttctcatgtctgaagatgagataatagactgaatgtaagattcatctctagaaaaagatagtctcgcctcagcgttgacttccaaattagccaattctccagtagacagtagcttaattgctatatctaaagcattaaaattctcttcggtttttatcaatactaattcgcatctgtccccagatatgggtttgagatatgcaaccttcataaaaacgagatttttatattgatcgcttgcctcagaattactattaagatatcccttatcccgaagagcccgtaaaattgccaaaggatatcttattctatactgagcgggcataagttgtcctttccgtacacaagatactaaagccattgcacgttcatatatctctctattagccgagtttaagcgcatagccccaggatttggagtaaaaacaaattgctctaacaccccattaccaaatcgtatggacggaggttttaatataccttcagaagccattacctgtacaagagaaagttcaacgggatccatcttattccctccaatttcctggttattgacaaccattgaaagaggccatccttggttagcttttagtttattcaaaacgcggcttatattcgaagagccggatttcgctgttaaatcagctaatccatcaaggttatctgcaaaatagtacggactaaggataatatctttacctcttgctttgtgagttcgtagcaagcccccttcctcactatacctcatacacatatcgaatgtattactatcggcgcccagcgtatttataagcttctgtttattctcaggtttattataaacctcactcagaattgcgagcattacagattctgtctcgctcaggtcactttcctctgcataattaccaatcacatcataaacacttttaaaatgtggaatcttaggaattacagcagttgttttggaacgtgtacctataagctcaatgaactcaagatcatctagaatttttaaaacttgatccaaagccattgatggaattttaaaataatggtacgaaacctgctttaaaacatcgtatggtatagtgccaagccctctaatatgaaccgcgagagttgctgccattccaagtttctttagataatcaaattcaggtgtttcatactcacctaaagcgctatgtaaatcataggaaaactctgcaatttttgttatgttcattagcgacccattatataatccattgattttaaacatctatttttgaaggggtagtatagtattatgataacaaatttctatctttctcgagtagattaacatgtaacatacattattatagcatgttaataaatgttggaacacctgcatataagtttcagacaatggtgttgtcatcaagaagctcttttaatgctgatttgggaccctactgtaagaatatccattttatctccatgccgtttttgagatttccattttttaccctagccaaaaataagtacactgtaaaatcagaggtcttcatctagctattttatcagtagcataatatttcttttcaggtcacctgacagtcatttttcacggatacgtagtgtctcgtaaatgtaaagaatacgtgtactttgcccttgcacggagaggtctttatggaaacaaaattcacgaaaagaccgacagaaatccggcgggagtaaaaaatccaaatgccaatatgtagtccctcgctactcagcagtagtttttgtactggatcatttccattataattcctttgactacaaactacattacgacgtaaaattaaccttaagcttataattaaaaaattttcaaatgaaaaatcaaagctatcgaataattaatatctaaaaccaccattacagaaccattcactttcagaaagcgcggaataaatagccgtccctcatgaattaatgcaattaaatcttctactttcagcctccagagttagatattccacaacactttcagtaccaccattattataaagaatacaatctaattaaccatctcttcggatactattcccagtttttttattctttgagtactgggaagatttttaaaacgacatccaaacatcataatttttaatttccaatatttaacttcgcctctagcaacaacatttcactctctttatttttcaccattgctttcatcatttctttatcgatagtgacgtcgccatttttagatatgattagatgcctgtcatatttattaacaagtagatcagataagcctcggctaaacccatcatttattaatgaaattattcttttatctttagtgccatactttatcttgagataaaaggtttcctcaataagaccaacctcattaatcacctcaataaatttaaatatttgataatctaaaaaatcatcttcttctttaattctcactatagctagatttattttttcagcatttgtttttttattaatgttaacccagtgttcacgatatccattcccgaatgtttcatcaccccattttccaacaaatacgaattctttctgcgtatcttttggaatactattccaataacttaaaaagtttctaataattaatttgaaaggtgtgttttttaccttccaagttaaaaacatcgcgtaaaatttttgtgcatccaaatttttcaacctggttaagtcattgtattttccatcatcaattatcttgttaatgaataatgatgaaatcaaagatattaatgattcctcatcagatattaaatcctgattctgacggtaatgatcaatctcttcctgaataatatgttcacaatcatgtatatttagttcagatatattattttcgtataatattttcccaatttccgtttccacatatttacctttataatccggaactattccttgctcgagattttctaaatcatcaatagatctgttaaattcatctatattatattcatttattgtggtttcatttaataaaacattatttacctgatcaaatcttttgctatcaactttagaaacctttttaataaaatcagctaaattcgtttttttcccagtatattgttcagttccgattataaatatggctggcaatagttttttaatttggattggcttatcattattaaaaatatcaccaaatcggttgattctgcccgcaagattattgaattgggaatggtttaatgaggtccggccttttttattttctaaaataaataacctttctactggtaaattaacgccttcaagaagagttgagttagttacaagatatttaacatgccgagattttttaaatatcgtttcaatatatagccgcacattatctgtcattgatccgtgatgatacacaatcccctttttcagacattttataataaggtagttttcatcaatgttttctgataactccatacaagctttatctacaacagcacaggtaatatcctgaagggattgagaaagttctctagaaaaattttctaattttttggggctattaaagtatataatgtttttatctaacgacttatttttaatgagctcaatatgattatttgaagttttctttatgctgctccacttatctaagaattgatcatatcgttgaaaattttcatgttgagttctgtaatcataaagatagataatctcacttttaacatattcatttactttatagtctgcaattttttggtctatcttttttaatgcaagattattagcatcattcaaaaacggcgtgaaatatttaattttaagattttttttacgaaaaattgctcggcagattacattagctaataatttacttctatttgtattttccagaagattatgagcttcatctattaatagaagatcgaagtaaaaatctttattttttgataataacttagaagctcgctcctgagttaaaacaaaaatattatcctctccttttttgtacatctcaggatgagttattactttcacttttgtattatatgattttataatgttattttttgtttgtgagattaatgctttagacggtacgataacacatctatttccaccaagggttttctttatttcttcaataataatattagatttcccatacgatgtaggcgctacaatagcaacattattatctggactttcttgaaggaaaaagttcatatcactttgctgttgagtcaatgtgattccattctcaaaaaagttatcagcgaaactatcagataaagttttaatgaatgtatcgttatcagatgttaaataatcatcactaagatgtttagctacaggaattaggccttggtttatggcaatctcatataacggaatataatcctttgtcttattggcataaagcaaagctatcctataaccaaaccttcttatgtgaatatcctcctgatttacaaaaacaatcgtcaatgacagtaatgtttgtatctctctcatagttaattcttttctgagaaacaacttggaataatagttataaatttctgttttctttaattgaagtaaagttagaggctgaggtttttttttgttcactttttactttcctcaatcaagaaatcgacaaccttatttaaagtacttttttgaatagaaaaacaaaaaacatctgcaaattcagctttttcgaccatacttttttgaaaatccataacagttttttcgatagttttaaattttatgtcgtggaataaactagaaataaaaaatacataattatcagtgctagttgatttcttttcagatgttttttcaccttcaatggcaagaagatctagtactacatccttataatttctatgctgagaaatagcaatgctagccgcattcatcgcattagcccaatgattgatttcattttcatttaatctagtttttagatcgttatacgctgtactcaaaagaagttgagaagtctcattaacatccttcccttttcgtaactcaccagatttaacttcagtaatccagactttatgatctgatgttgaatataaaagcaaatcaaatcctttcttaatacttttttcttcaagattaaaaaaaggcgaagcggtttcgaaattatctaaaagctcattgataatgatatgtgaaagaaattcaccaatcattcccttttgagtttttgcaggttttttttcatacctctctaaaaaagcttcaactgttggtttataccgatacattgcatatccgctcctagagtgagtttctccatggcaaatccgtgtaagatgattcttaagtgcttgcttgagctcatcagaaaaattcgatatgtgacataaaccatagccacttttgagcaaaatttggacgccatctaacgttttcaagttctactactcttgagatgattaaattttgtctaataatatcacacaattttatgtgtcagaatgtgaataatctcatagacgtgatctttttttcctgactcagcaattgacgtcgaaatgctatgaaacgactaataatacattttaaatacaataaaatcctttcatatcatatagttaactaattttattatgttataacttgctctatcattgtatacactactttcgcaacctattgacgttctactcatacgctgtgattttgcaatgtaagcactcagttaagagctgcttttagttaggcttgtcatgaccaccgatttttctgaacggtcatgatgtatcggttacaataccagccgttttgactcgcagtgggcaagccaggcaacaaatcctctacgagcaaaaagcgaacaaaccgctttttgctaacgagtcatttgggccttagtcagcactatttttatagcagctacgaccgcacaagtaggcttcccagcgacacaattaggggatattgaatgcttataaccagatttatataatccacaactaatggtggtcattttggtggtcttgacaggatgaagattcaggtttagcttacttattagccagttgctggcaaaggcgatcccagtcagaggagccatatttgaaaagcctgcttttgaagcaggctttttgcttttctgcgtcctgcgttaacttaaaattgcatccagcctggcaagcacttcatttaccacagcgtctggtatgctttccagccgcttgccgttccgggcagccatatcaatggttctgggctggtcgcagcgaataacgcccgttgtttttgtccctgccccttccagtgaaacggtgaaacctgccgtgcgagcaaaatttccaccgctggtgatgggaacaacaacgggtaaccgggtcagcttgttaaacgatgccttcgatacgataagcaccggacgttttccgctttgctcgtggccagcaatcggatccagtgaaacgagccagatttcccctctgtccatctacaggatctccttgcccaccgcaggagcatcaatccattcccgatcctcttcgctcatttcggcgtgcggatcgcactgcgccagcagctcctcaagagaataatgaggccgtttctggggttcaataatcaggcagccattattaatggtcatgccgacttcgctgtccgtcgacagctccagcgttttgagcacggcgggaggaaccgccaacatgatggatccgccgacctttttcaggcgagtggtatacatagagcacctccgaatattatattttaatataacatctacggcaggcggtgcacaattattcatcagattcatggtgatttccttttcgtaataaagcgtgaagaaagccgttatccatcggaggacagtacaggtgggaacgaaacgcgtaattaagaaggctgataatagaaaactgtttttgcggtttaaaggattatggcggttcaggtaaacggaatgcgaggcggcttccggatcggagctgcttcggaggagcatcagcggcagcgtgaaggccagatttttccaggttcgaagtcgaacgcttcagcaatcaatctttagctgttgggccagcggcgggtaagcgtactagccagcatggagggcaccaggacctgcctgtcgcaaaagcgctgacagtaaagtgccccgtttttcagcccacctatgatgtcgacaggatgccggtcagactgcatcatactttgagatataccgcatcaataaacttcactcttcaggcagtacatcgccagcgcggggctttcatttttgttgtgagctcatcaaaaaacggctgaaaattgaggagactaaaacactattcatgatttttgaggcgaaagcttggggcgttccttttgtttctgcccgcaaccctgaagacagagccaaggacgaagatctcatcgttatggcaattcgtcatatactgaatgacaaagcgggagccgaccaaactgaggttcaaaaacgccaggcatatcgccgccattttcgtcagcgataccaaccccggcggctaacgggaggatcggggctacaacgggtttagcggtattttgcacccgtgcagccccggaaccgggcagcgttaacggcgcgggatggcgaccggacgataaagccgcagaagcgtcaggcgtatcgaccgtgcaaaatagcgtgataaaatcagtttttcatcccgtctattttcacccgccgtttcacatgctattgctccaggatatttttattcatcgacatcacccatgttataaatgttctcagggggaccgggatatgtttgcggctcggatagtaaatattaaaacgatcggcaggataacgataatcagacagtaagcggacaagcccgccttctttaattttatcctgaaccagattctcatacacaaaggcaatacccaacccggattccgcagcctgtatcatcgccgcatcggaatccatcaccagatcgcccttcacagccacttccgttataacgctcgtagcgctaataaactcccagcggtacagatccccacctggaaagcaacgattaatgcatctgaaattaacgagatcttttggtgaagagggtgcgccgcatttttttataaaatccgcactcgccactggaataagagatagcggttcgccaaagggtatggcaatcatatctttaggcacatcttgcgtatagcgtatacccgcatcaaatcctgaatctataatattaacttttctgtccgtggtgaataactcaagtttaatatccggatactcatttttgaacggtgcgaagtaacgttgaaagaagagatccagcacaatgcgtggcaaatttagtttcaccaccccttccggctttgctctgtgctcattaaggttatcaatcacccgcctgtagtcattgagcacaggagtaacgtcattcagaaactcctggccgatagcggtcagggaaagactgcgcgtagaacgatttaaaagcctcgcgcccagtttctcttccagattatttatggcaatagttaacgttggtggagaaatattcaactcttttgctgcctgacgaaaacttccatgcttcacaataagaataagcatttctacatgttgcaattcgggaatatttttcattgttaacatccgtaaaatactgcattagaaagagattaattgttgtgagtggaaaagggaagtatatatttcagcacattgtacgagtgaggaaaataaaatggaaacacgttatctgggaaagaacaaatttcaggtgtcggcattaggtctgggttgtatgggaatgagttttgcctatggcggagccgaagagtcgcaggcaattaacaccattcacgctgcggttgatttgggcgtcaccttccttgataccgcagaagtttatggcccatttgagaatgaagtgctgatcggaaaagcaatcaaaggcgttcgcgataaggtacagattgcgaccaaatttggtttccgcattcttcctggcggtcaggggcttgagcgtatggccggcgttgacagccgtcctgaacatatccgcgaagcggtagaaggctccctaaaacgtctcaacgtcgagactattgatctcctttatcagcaccgcgttgatcccaccgtccccgttgaagacgtagtgggaacaatggcagatctggtcaaggaagggaaaattctccatatcggactttccgaggtctctgccaatactttacgccgggcctgtgaagttcatccgatcgccgccgttcagaccgaatattctctctggacccgcgagccggaagaaaacattctcaaaacttgccgcgaattaggggtaggatttgtgccctatagcccgctgggtcgtggattcttaaccggcaaaatcaccgatcggtccggcttcgccgaggatgattttcggcgcaatcttcctcgcttccagcacgatgccatgcggaaaaaccagcagctactcagccagctgcgggatgtggccgataaatatcgctgtaccctggcccagctcgctctcgcgtgggtgatgagtaaaggcgatgatattgtccccattcccggcgcgcgccaaatcgcacatttgcaggataatgccggcgcagccagcctggctatttccgatgttgatattaaactcatcgatcgcatctttacccctgacaatattcacggattaagatatacccagggtgattttcatttaatcgataagtaacatcctgctataaattctcccgcctttccggcgggagctaaggtttaccgtctcgcgcacatttctcctccaccgcgccagtttgctggcgccatgcggtaacctcctcatcaagccaggccttaaatagaacggcttcgtttttctgctctgcgccctgcgatgaaaccagccagtaaggccacggataaggggcggtgaaagacgtaagctgtaccagttcacccctggagagcgcatcctggactaaagagcggcgttccagcgcgatacctttaccgagccggactgcctccagcactaggtttgagtcgttgatgcacaaaccgcctggcacaatctctctttcaagccccgcgttgatacaccatgctttccacgactccatggaaaagataatgttgctcttcgctatctctgacggcgtacgggggagcacgccgccgttataggttggcgcggccacaacgataagctgatcggagaaaaggtaatggctctccgttccttcccagtcgccttttcccatgcgtatagccaaatccgccccttcctgctgcatgctggttatcgccaggctcgcctgtattcgcagcgagatatgggggtatttctcccgaaatcgttccaggcgaggcaacaaccagtggcagccgaacgagggcaccatcgccagggtcagatcctgccggcgggggttgacctgcaccagccgggtggcatcagcaatatggtgcaaagcctcgcggacctgtaaggcatagagccgcccttcttcattaatctgcacgccgcggccgtgacggataaacagcttgaggccgaccatctcctccagcactttaatctgctggctgatggctgaatgcgtaacgtgtagctctttcgccgccagcgtcacgctgccaagacgcgccacggcttcaaaactacgtaaactcgcaatagggggaaaatccgccatgttaccgctcccacaacctgacgcgtaaaacgtgacccacaatctgtcagtaatactaacccaacccgtaagatactgaagatattcgccatgacgaatttattgtactgtttcttcaccgccggcaatgaagcattaacctcagcctatttcaccagcacaggaaaacaggaatcatgatgaagcttattggcatgatggattcgccttatgtaaggcgcgtggcgatttcccttgaactctacggcgtcgagtttgcaagtcacccgctgtccgtattcagcagctttgaagccttttccaggataaatcctgcggtcaaagcgccgacgctggtgctggataacggaattcgcctgatggattcgtcgctgatactctcttattttgaagcccaggccgccccggggcgcaagctgctgccggtctcgccggacgcgctggcaagggatctgcaaacgctgggctttattctcgccgcgggtgaaaaggcggtacaaaatgtctatgaacacaatctgcgcccggcggaaaagcagcataatccgtggatagcgcgcatcacgactcagctgctggcagcctgcagggagtggaacaggctgctggaggagcgtccggcggccgcggttcccgatcaggtggccgtaacgagtacggttatctggacctttattcagtcaacgatccctcacgtggttcatgcgggagactttaatcatatccggtccgttgccgaattatttgaaacccatagcgcctttaaaaaacatccctttagctaaagcatcagctcaatgcgatgaagctaaaccctgaacgtgaatcgccacggcaaccgagagcgcccggcaaccgcgggcgcgttatcctgatggaagaaatcgcctggcgtgagggaaagggttaaaaaccgctaccggcgtgcagtgctgcacgaccaatctccaccggcatccctgaacggcgttcaagcgcctgctccgcgtgattcacatccaccccctcgcccttcacaaaggcctgaatcgccggcgtgatggggagcggcaccttccggtccgattcatactccgcgcggttacgcgacaacggttcgtgaacctcaacccagcggctgccgtccggctcggcggtatacttcaccggctggtcgatgatttgcacgcgcgtcccgaccggaacggtatcaaacaggtatttgatgtcgtcgttacgcaggcggatgcagccctggctcacgcgcaggccaatgccgaaattggcgttggtgccgtggatcgcgtagagcctgccgatgtaaatcgcgtacaggcccatgggattatccggccctgcgggcacaaacgcgggcaggctttcgccacggctggcgtattcacgacgggtattggcggtgggcgtccaggtcggcgcctcctgcttacgctccacggcggtgacccagttacggggggtttcgcgtcctgcctggccaatgccaatcggcagaacgtcaaccgttgtgccatcgggcggatagtagtagagacgcatttcggccacgttgatcacgatcccgttgcgaaccgtagcgggcaggataagctgctgcgggaccaccagcgtggagcccgacttcggcagatacacgtcgacgccggggttggcctcgagcatattgctcaggccctgaccgtactgagcggcaaaggcctccagcggctgggtattgtgttgcggaatggtgatggtcagcgggctgcccaccaggcggcttccttccggcggcaacgggtagctcaccgccagagcgctctggctggtgaggatcataataagagaacaaagcagtttcacacgccgcacaatttcccttcctttgtggcgataatcgtgaatgaattatagcttcgtttactctttcatatctgatttatcatcctgctaaatctgataatcgattgcggcctcttccggctccatcgcctgacgtttaatttcctccagcgacagccctgcgttacacagttcaataaagcgccagacgtaatttcgctgcagctgaccgcgcttcaggcccagccagacggtattggcatcgaacagatggcgggtatcgagacgcgtaaaggtatcagattcccgcgcgtcgcctgactgttccgccaccagccccacgcccagccccagctcgacgtaggttttgataacgtcggagtcctgagcgcttaatacgatatccggcatcagccctttacggttaaaggcttcgtcaatacgtgaacgcccggtaatcccctggcgataggtaatgagcggccagcgggcgatggcatcgagggttaacggcgtcacctgggtcagcggatgatctttggggaccagcaggctgtggtgccagcggaaccaggggaaagccaccagcgtcgggtcgttgctcaagcgctcgctggcgatgccgatatccgcgccgccgttgtgcagcagcgcttcaatttcctgcggcgtcccctgaactaattcaagacgtacgtcggaaaagagttcgcggaaggctttaatcaccggcggcaggctatagcgcgcctgggtgtgggtggtggcgatggttaagacgccggacgcatcgttggtaaacaggtccgcaaggcgacgaacgttgctggcttcattcagaatacgctcggcaatcgacagcaacgctttgcccggctccgtcatccccagcaggcgtttgccgcggcggataaaaatctcgatccccagctcttcttccagttcacgaatatgacggctgacgcccgattgcgatgtatagagcatattggcgacttccgtcaggttgtaatcctgacgggccgcttcacgaataattttgagttgctggaagttcaccctttcctccgggctatcagacataacatatgcactattgttaaagtctgttgtccctgctaacaaataataaaaaccagcaacttattccattcaggaatatagcctaactgactaacaatagttcacggttttccagcgacggacggctcaccagcgacattaaaatttccttaaccgcctgcgcctgcggcgacagactgccgcgtgccgacatattgaccgacagcgacaggctcattgacggcgtgctgatgcgcgccatccagccattcgccgcgctgcacagcgaacgggcggcggactcaggcagaacggtgacgcccatgccgctggcaatagccgccgtcagggtggtaatggattcaatttcgccgataatttttgccgacagtcgacgcagagtgaaggcttcggtgacccttgcgcgaacggcgctgtaatcacgcggcaggaacagattcatttccgcaaccgccgtcaaatccacgctctgccccgggcaatcccgggttccgaccaggtagagatcttccttcagcagcggctgactgacgatcccggcgaccggggaacgttcatagagcacggccatatccagctgaccgtcgataagcttatcgttgaggatcgttccgctgctttcctgcagatagaccataacttccggaagctcgttacgcaccgtttgcagcagcggcatggtaatggccgaagccgccgtgcccggggccagcccaattgacacctggccgcttagcgtctgaccgacgttgttaaccgccagctgcgcctgctcgcactggcgcaggatagtccgggcgtgggtgtaaaggatcttgcccgcttcggtcggcgtcacgccgcgcttggtgcggatcaacagctgctggtccagctcgccttccagggtcgcaacctgctggctcagcgccggttgtgcgatgtgcaagacttcagcggcctgggtcagactgccgatatcgacgattttcacaaaatacttcagtcgtcttaagttcattttgcctcctgtaaggaacaccagtaccaacactggccgtttagatgcagaaggttttgcaatttgcttgccagcttttttgcagggacgcaaatgccgctgcaggccgcgtaataagggatactgatagcaaaccgcgattttgttgcccggtaagcggattgcggtatgccccattaggggtataaatgcaccgcaacggtgcatccggcggcgcaatgccgtaaaaacaggcactctgctgaaattgtcagcaaacgaacaagttaaggtgattcaggctttgacaagggggatggtcatcgttaatatgcgccccgttcacacgattcctctgtagttcagtcggtagaacggcggactgttaatccgtatgtcactggttcgagtccagtcagaggagccaaatttaagaagcctgctttcgagcgggctttttgctttcttactctctcatttcagccagatcgtcttctttagtaacccccctcacgcgttctacaaccgcctcactcctctggctgtaacagaggaaaaaccccaaaacttattaatatcaattatttacgcaaataaacgacggtgagtacaggctgcggacgatccagccatttttcatcttttgtatcttaatatagcgtcccgagtccggatcgggactaaaaaagactttttgcatcattccctcgatcatattgtcggctttccgcttcgagatggtcgtttgggttaagtggtaaatgttattagctttctttgcatagatgaaatgatacgatctttcgacattgtacttgacgttatcgacgatcacttttccggaaacgtcaaaatagccgctgttatttccccgcatcagcaagaaagttttaaagtttgcatcaaagccaaatgagcccgattcaattcgcaaatttgcggaacaatcaaaatcgttttgctgatgaaaatgatttatcagccagccgcaaacaaaaacagcaaataaaattgacaacagaacataaacgctctttaccttaacgttattcaggaatttcataatcaggcctatagtagttctcacatgaatacagcgcacctggttttatttttgagtagatacagtgggccaaaaaaacccttccctcattggcttttaatacagattccgaaatattaaagtaaaaaacgctgttgcctaagcacaccattttctgctttgcgatcagctggcggaccagaaccatcatcttttgctgttgctcattcggtatggcgttaaaagttctgaccgggcaagaatcaatgcttcccagataatagccttcatcctggctggccgcaaaaatcaggcgatatcggtcggcactcacgctccagaaaaggataaccaacacaaatagcgcaagcagcgcatagccagacttttttgcccatcccgcagaaaatttacgtgttcccttatgtgcacagccgctgctgcttaacgcaatagcttccgcatcgttttcattacgtatggcgggggctgaattatccaccctctcaatcagtatgctcgcggacaccataaacccaacccggggcacggtaacgataatctcctcgacacagcccatattcctgaagatggctctcaggtcagaaatatatttattgaggctatggctagaggtccgcagcccatgcgcatcccagactttttcaagtatctcgttcctgtaaaccacatgctccctatggtctaaaaggaacttaagcaggcggcttgtggtggctgtcagcgtgacgcatgagtcttcatcgagccatatcagcccgtcatcgctcctgaaatggatcgttccttgaattttgtagatcataaacctgccttacaaataatcctcagtcgcatacaatccgcacatcaggcacatgcgcagtatttcatactgataataaccttaactttattgtaaattgaattttaaaacctaaaaaccaataaaagagaatacatataactaaaaaaaacacaatgctattattgccttcatcgaaacacacggcgtaaccaggcccatctgagctaaccttgcgcctgaaacaatatagaccaccagaacatcattcgggatgtatgagctgaacgcgtcctgaagctgtgagaaccgaggagataaatgatgattaaataataccatcacgcaatcaactacctgatacatgaaatggccagggatgatattttcaccgcctgaattagcgtcctgaaggcagcgtaaaagcgagaatccggacatctctataatggatatgcacaggcagataaaaagaaatctgattggctaaagataaagatgtcagacatttatcaaggaatgttccctaagaaaattccaatacaaagagtgtgcctattgttcaggggttaacgataactcaaccctatcatttttaatttacaaaaacctataaaaaaacaaattataaacctttaacgccatttataatgaaaatcacaaacaaaacacccacaaaattataactttgcagtggttacatcttttagagcctcagccgcatgcttcattgagacgggtgatgttagattactctcaattcgctgaatggttttattaacgatgagttaaaggtcaacccaaggatgagatcgcgttcagatatgaatctatcaactaatattttatctaaggataaatattttactctgggcctgattgaactgcttggagaagaatttattgacaatttctttttgattatagatttggactctaacgacctttcgggttcggagtggatttatttttcaaataaaaacattgttgccttcgcctccagcgacttagctttttataagtccgagctatttgaaaaaataaccgtactggacaaaaaaagtaataccagaagcatcctgaatttctttttaaagaaagaaacctcaggaaattatcatacaaagtaccggctaagcctgcgtgaaaagcagatgttaagcatgttaagcagaggggaaagcaaccaggagatcgcagaagagtttggcgtgaaacttaagactatttatacgcaccgccgcaacctgatgaataaattaggttgtaaaaacaggattacgtttcaaaagttatttttcaacaataaatgtttttttaagtgaagcatagcttcaggattattcataaacaggagttttatcatgaacaaattagcacttatcgttatttcagcactgtccctgagttctgctgcggctctggccgataccgttacggtgaacggcggtacggtgcattttaaaggggaagtggttaacgcggcctgcgcggttgatgccggttctatcgaccagaccgttcagttaggccaggttcgttctgcaaagctggcgaccgcaggcaacaccagcacggctgtcggcttcaatatccagctgaatgattgtgataccaccgtcgccaccaaagcctccgtcgcgtttaccggcacggcgattgacagcgccaacccaacggtactggccctgcagaactccgccgcgggcggcgcgactaacgtcggcgtacagatccttgaccgtaccggtaccccgctggcgctggatggtgccgccttcggcgcgcaaaccacgctgaacgatggcaccaacgttatcccgttccaggctcgctactacgcgactgccgcagccactgccggtaccgctaacgctgacgccacctttaaagtgcagtacgagtaattttttcatcaggcagggaagcgcgtcgggccaggacggcccgttatccgaataagagtaagggtgataatgatgcaaagaatgaagtctggtctgttgattttattgctcccaccgctggcgctggcaggaaaccagtgggacaccatgctgcccggcgggaacatgcgctttcaggggatagtcattgccgagtcctgccgcgttgaagcgggcgaccggcagatgacggtcaagatggggcaaatcagcagcaatcggtttcattcggccggggaggacaccaaccccgtccccttcgatattcacctgcaggagtgcagtaccgccgtgagccagcgcgttggcgtggcgtttcacggcgtcgccgatggtaaaaatccggacgtcctctcggttggcgagggtccggggatcgcgaccggcattggcgttgccctgtttgataaaaccggcagtcagatcccgctcaatgcgcccgcaggggcatggacgcagctgcacacggggccaacgacgctgcattttgtcgccaaatatcgttccaccgggaatcaggtcaccggaggagcggcaaatgctcaggcctggttctccctgacctaccagtaatcagcgccggtaacaggaattcaccgtgagaaagaaagagataagcatgaaaaatagacgggctaccacgcgcgggatgcgcggtttactggcaggactcctgctgctctccaccgccggttttaccgctcaggcgcaggccggcgtggcgctgggcgcgacccgcgtgatttatccggccggacagaaacaggctcagctggcggtgaccaataacgacgacagcacctatctgatccagtcatgggtagagaacgccgatggcgcgaaagacgggagctttgtcattaccccgccgctgttcgccatgcaggggaagaaagagaatactctgcgcatcctcgatgccaccaatggccggctgccgcaggaccgggaaacgctgttctggatgaacgtcaaagcaattccatcgatggataaatcaaagctcagcgaaaacacgctacagctggcgattatcagccgtatcaagctttattaccgcccggccaaactggcgctaccgccggatcaggccgcggaaaagctgaagttccgccgcagcggaagctcactcacgctgattaacccaaccccttattaccagacggtcaccgagctcaacgccggaacccgggtgctgaaaaatgcgctggtcccgccgatgggcgaagccagcgtcagtttaccgtccgatgcaggtcgcgagattacataccggacgattaacgactacggcgcactcaccccgcgtatgaaaggcgtcatgcagtaactgaccggggagcagcgctctccccctgaacgaaaaaaataacgatggccgggcgactttggaccggagggactatgtcacatctgaaatatggactcgaccacttgggctcccggcgaatgactccaggatctgctcgcgtattcgcgcagatcccccttgcccttttactttcctcaccggctttttacgcgcaggcggagctctatttcaacccacgctttctggcggacgatcccgccgccgtggcggatctgtccggttttgaaaagggccaggagctgccgccgggtacctatcgcgcggatatctacctgaatgacgggtatatgaccacccgcgatatcacctttaatgccgctgaaaagggccacgggctggccccctgcctgacccgcggacagctggccagcatgggcgtgaataccgcggccattgccggaatcgacgtgctggcggcggatgcctgcgtaccgctaaccgagatgatcaaagacgccaccacccgctttgatgccgggcagcagcggctgtatctgaccgtgccccaggcgtttatgggcaaccgcgcccgcggctatattccgcctgagctctgggaccacggaattaacgccgggctactgaactacaacttcaccggcaacaacgtgcacaacgacgtcggcggcagcagcaactacgcgtacctgaacctgcagagcgggctgaacctcggcgcctggcgcctgcgcgacaacaccacctggagctacagcagcagcggcagttcgacgaccaatgaaaacaaatggcagcatatcaactcgtggcttgagcgtgatattacgctactgcgttcgcgcctcacgctgggcgacagctacaccaacggcgacgtctttgacggcattaacttccgcggcgcgcagctagcttccgacgacaatatgctgccggacagccagaagggtttcgccccggtcattcacgggattgcccgcggcacggctcaggtatcggtcaaacagaacggctatgagatctaccagagcacggtgccgcccggcccgtttaccatcaacgatctctacgccgcgggcaacggcggcgacctgcaggtgaccatcaaagaggccgacggcagcagccaggtgttcaccgtcccctactcgtccgttccggtgctccagcgcgagggccatacccgctatgccgttaccgccggtgagtaccgcagcggcagcaatcagcaggaaaaaccgaagttcttccagggcaccctgctgcacggccttccggcgggctggacgctgtatggcggcacccagctggcggaccgctaccgcgcctttaacctcggcgtggggaaaaacatgggtgacctgggcgcgctgtcgctggatatcacccaggctaacgccaccctgcccgatgacagcgagcatcaggggcagtcggtgcgcttcctctataacaagtcgctgacggataccggcaccaatattcagctggtgggctaccgctactcgacgcgcggctacttcagcttcgccgataccacctacagccggatgagcggctacaacgtcgagacccaggacggggtgattgaagtgaagccaaaattcaccgactactacaacctcgcttacaacaagcgcggcaaagtgcagcttagcgtcacccagcagctggggcgcaccgccacgctctatctgagcggcagccaccagacctactggggcaccggcaaggccgatcagcagctccaggcaggactcaacgccgccatcgacgatatcaactggacgctcagctacagcctgaccaaaaacgcctggcagcaggggcgcgatcagatgctggcggtcaacgtcaatattccgttcagccactggctgcgttccgacagcaagtcggcctggcggcacgccagcgccagctacagcatgtccaacgatctgaacggcagaaccaccagcctcgccgggctgtacggcacgctgctggaggacaacaacctgagctacagcatgcagaccggctacgccggcggcggtgagggcaacagcggcggcaccggctacgcggcgctgaactaccgcggcggctacggcaacgccaacgttggctacagccgcagcgacggcatcaaacagctgtactacggcctgagcggcggcgtgctggctcacgccgacggcgtcaccctgagccagccgatgaacgacacggtggtgctgatcaaagcccccggcgcagacaacgtcaaagtggaaaaccagaccggggttcagaccgactggcgcggctacgccgtgctgccctacgccaccgaataccgggaaaaccgggtggcgctggacaccaacagcctggccgataacgtcgacctggacgatgcggtggccagcgtggtgccgacccacggcgcgattgtccgcgcggagtttaaggtccacgtcgggctcaagctgctgatgtctctcatctacaacggtaagccggttcccttcggcgcgctggtgacttctgacggcagccaggccagcagcatcgtcgccgataacggccaggtctacctgagcgggatgcccctggcgggcaaagtgcgggcgaaatggggcgaaggtccgaacgccagctgcgaggctgactacagcctgccgccggaaaaacagaaccagatgctgatcccgctgtccgccgagtgccgctaaggagaccatgatgagaaaaaccctgtatctgctgagcgccctcgtatcgctggcggtcaacaatgccagcgcggcggacagcaccatcaccatcagcggctacgttcgggataacgcctgcgccgtggcgggtgagtcgaaagattttaccgtcgacctgatggataacgccgcgaagcagttccatgcggttggggcgaccacgccgctggtgccgtttcgtatcgtgctgtcgccctgcggcagctcggttaccgcggtgaaggtcggctttgttggcgttgccgacagcatcaataccgacctgctacagctcgacggcggcgcctcagcggcggcggggatgggcgtgcagatccttgacgcgcagcagacggcgctgccgctcaatgccgcatcgtcagcgatcccctggaccacgctgacccccggccagaccaacacgctgaacttttacgcccggctgatggccacccgggtaccggtgaccgccggacacgttaatgcaaccgcaacattcacgcttgaatttcagtaaccggaggcgctgatgaacccgacctattccggatggctgctggccgcgatgctggcggcgtcctccccgacgctacaggccgccgacgtcaccattaccgttaacggtaaagtggtggccaaaccctgtaccgtttccaccgttaacgccaccgtcgatctcggcgatctctatacctttagcctggtctccgccggcgccgcttcgcccttgcacagcgtggcgctcaccctgagcaactgcccggtcggcacgtcgcgggtcaccgccagcttcagcggtacggcggacgccaccggctattacaagaaccagggtaccgccggcaacatccagcttgagctgcaggatgagggcggcaccacgctgaacaccggcgcgagaaaagaggtacaggtcgacgacgccacccagtccgccagcttcccgctacaggtcagagcgctgacggtcaacggcggtgcgacgcaaggaactattcaggcggtgattaacgtcacctatacctacgcctgagccaggagaacagagtaatgaaaaagataatcaccctgctgttaacgctgctgctggcgggctggtcgcttaacgcctggtcgttcgcctgtaaaaccgccgccggggtgacaatccccatcggcggcggatcggcgaacgtttacgtgaacctcgcgccggcggtcagcgtcgggcagaacctggtggtggatctctcgacgcagattttctgtcataacgactttccggattccatgatcgactacgtaacgctgcagcgcggctcggcctacggcggggtgctgtcgagcttttccggcaccgtcaggtataacggcatcagctacccgtttccaaccaccagcgaaacggcgcgtatgacctatagctccattgttgatagcccctggcctaccgtcctctatctgacgcccgtcagtagcgcaggcggcgtcgccatttccgccgggtcgttgatcgcggtcctgatcctgcgtcagaccaacaataaggataacgacgacttccagttcgtgtggaacatttacgccaacaataacgtcgtggtgccaaccggcggctgcgacgtttctgctcgcgatgtgacggtgacgctgccggaatatcccgcatccgccgccattccgctgacggtttactgcgcgcaaaaccagaatctcggctattacctctccggcaccacggagaacgcgggcaactcgatatttaccaataccgcctcagcgtcccctgcccagggggtgggcgttcagctgacgcgtaacggtagcgtcgtacccgccaacagtacggtgtcgttaggcaacgtaggcacctcggcggtcagcctcggattaaccgccaactacgcgcgcaccagcgggcaggtgaccgcgggtaacgtgcagtcgattatcggagtgacttttgtttacgaataatctcccgccccccggcggcgggcagccgctcgtcgctatcctgtcgccctgttcgctggctgccgaggggctgagggggataatagcgaagggaggagcccggcccgttgtgctgcccacggagacgccgcccctgcctgccggcgttcgccgcgtggtggtttttctcccggaaggccccgccgggctactggcaaccctgaagcgggccgccgcgctgctggcgcggtccaccacgccgctgcccatgctgttcctgagccgcagcccggcaagctggctgtggcccaccctggtgcatcaggtcgcagaccggcgtttgcttaccgccgtacgggccgccgcttccgatttgccggtcccctgcctggcggcgctgctgcgcgacgccgtgctcgaagaatacccctctcttgagcagctggcagaggatgaaacgcgagcgctcggcaagcgccccgccgggatcacccggccagagctggacgctatcctcggtttactctgcggctaccgcgccagcgctcaggctcaacgccgcggcatcagccacaagacgctctacaatcaaagaaccgcaggattaaaaaaaatggtggaacaccaccctgaaatggccgcccgctttcccggcagccagataagagaccagaaaagcgagagcatcgccgccctttccgctttcgagcgtgaacttgtgcatgcgatccacagccgccagatttttccggtatttcagcccattaccgatgaacaccatcaggtaaagggaatggagatcctctcccgctggaaccgaaacggcagcgtgctggctgccggcgattttttaccgcaaatacgctcggaatatgcctggctggtgctcaccgcgtttgtccttcaggaagcggtgcagaatattaatcagcattccggcgagtgttatttcgccgtgaatattcccgccgccgtcgccggcaacgagaacctgcttcgcatgatggaaaccgcgcgccagcagctgcgtcagccgcacaggtcgcagaggctggtgctggagtttgctgaaaataccgacctcaacggtcacggcaaaatcgccgaaaatatcgcccgcctgcaaaagcgcggcttccctatcatgcttgatgattgcttctcgcaaagcagcgtgatgtttccggtgcgcacgatgagattcagcgcttacaagctggatatgagcatcgtcaacgatatgcagcgcgatccgcacgcgctggcgctgatcagaagccttatcttctactgccagctgaccggcagccgctgtattgccgaaggcgtagatagccttgagaaattcaacaaactgcaggcgttgggagtcgaccgctttcagggcagctacctctcggcgccggtaggcagggagaacgtggcggagcttcttctgccgctttcgggcgaggcggagcatcgcgccggcatcgcgataccggtaacgcccgatggacaacatcgggcattggcgacacttcagcgcagctccggccagtagccacggttggcgacgatcagttcatcaaggatagcttttgcgaccgaagcgctgggtaccgttttggacagggtcatcgcctgccagagcttctgatagcttccttcaacccaggcatcgaccaccagtttttcaaccgccacctgctgctccatcatccccttttgaaacagcgggatcttacccatcgccagcggctcggggccattaacgcccaccaggcaaggcacttcaaccatcgcggtatcgtcaaaattcgcgatagcgccgttgttttccacaatcagcagcattctctcctgggtgttaaaggcgatggcgcaggcgaggtcgacaataaaggtcgcatgcgccccggcatggaaatgcgcctctttggcactttgccgggcgacgatctctctggccatatcaaacacctccttctctctccccgccatcacttcattggcgcgagtaaagtcagggtctgaatgggcaacctcatagtcggcataaaaatagtacttcagataggtattgggtaacgtatcggtatccagcgcaaaaacgtccttcacctttttgaaggtctcaatccagctcggcgctttatgctgaaaatcctctttcggactgcaatagcccagctcggcaacgtggttttttaacgccggcattaaatcgttgccggccttatcggtaatgctggtccaccagccgaaatggttgaggccaaaataacggacgttcatctctttacgcgatttcagcccgagaatatcggcgaataacccttcaatagccaccggcatatcgcagatattaataattttggccgtcgggcgtagccgacgcgtggcctcggcaacgatcgccgccggattggaatagttgagcatccacgcgcccggcgaatacgtttccatgtagtcaaccagctcaaggacgccggcgatagagcgcataccataagcgataccgcccgggccgcaggtttcctggccaatcacgccatgtttaagcggaattttctcgtctttctcgcgcatctcatagaggccgacgcgaatatgcgccattacgaaatcgacgcccgtaaaggcttcctgcgggtcggtggtgaagctaaaagcaacgtgcggataatgttcagccaccagaatcgcacaggcttcgccaatcactcgctggcgatcgtgatgattatcatagagacgaatttcgcttaacggaaacctgtccatattttccagcagcatcataacaatccctggggtatacgtactgccgccgccggctatggtcacaacgaatttatttttcatcttccacctcattattcatgtacatctaaatagcgattcacggcattacggattttattaacccctaaaccataaataacctgaacgtgattgcctttgataatgacgctggtaccgccgctggtcttcagaatgtgttcctgaattaatgcggggtcccgcacgtcaacccgaagccgcgtaaaacagttctcgaccgaacagacattttctttgccgccaaggccaagaatgacctgctcgccggaagccttgtcaggcgcgcttacgcttgccggttggttagccccctccccctgctgctcctggcccggcgtacgcattttgaaacgcagaatcagaaacttaccgatataaaacatcgtcgcggtttccattaaccccagcgcgacaaacacaggccagcgcgtgaggtgcgctcccgccggaatgttgtaaacaataaaatcgataatgccgttggtggcgcagacccgcacatccagcagccacgccagcatctggaaaaaaccgtccagtaatgaataaaccagccatagcaacggtgcggtaaagataaataagaactcaaaaggttcggtgatccccaccaggaatgaagtcacaatcaaaggaatcagcgtgattttcaacttttgcttattttccggcctggcggttgtataaaaggccagggccattccggcggtaccgaaaattttcaccatgccgtaggtgagaaatcgcgccgagtcgcttaacggcccagcgctatgagcaatttcagcgaggaaaatcggttttgcccccaccaccgtctgaccatcaatcaacagctgtccgccaatggaggtaaagacaaagggcgaccaaatcaggtggtgtagcccggtcgggataagaaaacgattgagaaaaccgtacagaaaaacgccggcggcgccgaaggttttcatcaccccggtcagcgccgatatgccgtgttcaacaatcggccagacgtacaccgtggcgatggcaaacacgccgaccagcgggatcatcatcatcagcaccagcttgctgttgccgtagatagagaaggcgccgcgaaactcaatgtcgacaaaccggttgtgaatgcaggcgaccgcgcagccaaggataatgccaagaaacacgcccatatcaatgacctggaagccaaaaataaaggtttgtccgctgccgtagagctgcgcgttgctgctgccggcggccaggcgctgcgtcagggttagccaactattattcgccgccaggtacataaaccaggtcattgcggcaacaaaagccgcttccgcttttcgggtttttgccagcccgctggccagcccgaggcaaaagaagaagccaagattgttcatgatggcccagagcatgctggaaacgtatttccccagcagataaagcgagctctcttctgcgacccagattttattggttgtcatactaaacaacgcaatcagcagaccaataaccggcagatacaaaaccggcccaatcatggccttcgaaaaatcctgtaatttttttaccccgatcatcctcaccccctgtcccgcacatcggccgtcagcgcccgatacatgcgtttcagcctatgcgccggcagacataattcagagcggtgaaatcgtcatctgtgatgaaagtcatatctctcttgcggcaacagatatataagtaaaagcagataaatagatgacagagacaaaacaacgccccgcaatgataaaaatacgttaattattaaaaagataaaattataatccgctgacagaacacaccacgagaaatctataagtgatatataaaacaatcgcagacaggctaaaaaatcgcatcaatagcgatgaattcgaggtgggagatgcgctaccgagtgaaaaagcgctggccggggagctacaggtctccgtcatgaccctgcgcaaggcgctcacgctgctggaaagtgagaagctgatcgtcaaacgccacggcagcggttcatacgtggcgcgtaagagcaattatcgcggcggggaacttgacggcttcaactaccagatgcacatcggcggcgtcaccaactatcgcaataaggtcattgagttcacgatgcttgatgcgcctttggctatcgcacaacagttgaaaattgagccgggagagaaggtctattacgtcagacgcattcggatgattgacgacgtacctattctgattgagaacagctatataccggtggcgatttttccctggctaagcgttggaaatctggaaagatcgaaatttaactatttcaagaaagagtgcaatatcaccatcctggagagccaccgcagctataccccggttctggccacccgggagcaagcagagctcttacaggttccacaaaacagcctgctgctacgggtgcagtcgatcagctatgcccataacaataccattgttgatttatccgatatttaccagaataccaacaaatacaatgttaaacatattacgcgccgctaaataccgcgggatacggctgacgcaggccaccgagagccgtccagcgtcagctgacgatagacgacagctgacgattctgcgtcggcaaacgactaccagccgcagacgttagtctcttcgtcggactcgtagccgcggacaatattaatcagatcttttaccgcatcggccgccgtctgcggatcctgcagctcagccagagaagcaaactcgctatcgaccgagacgccgttattattgttggtcaccgtcaatataaatccctttcctccggcgttttccaccgacagcgtggaaataagctcagccacggcctgggtggcgatatcagggacataaagggccatcggtttaagatacactttttcttttttatctttattattcccgttgatcgccgctaacgaatagcctttattttcactgttcatcatattacctatccctcaatcagaatgtcagggtcaacgtaaaaatcgacgttaaaaacggtatcctcggttaacgcctcgatgcggtgccacttttcgggcggaaaaacgccaaattcaccttcggcaatggtcagggtttccaccggttccgcgctggtttcatcggcatatccgaaatagcgtatcgcccctcgcatcaccgacaggcgcggatagacgccctgccgggtaccggcatccagatgccgcttccagattgaggccggcgccgtccgcttcgtccacagcggcgtgctccgggtatgcacatagtgggtaggaataatgattcgctgcatgattttgcctctcttaacgcaccacatatacggtcgaaaatgggaaaatatgttgcatatgatataccccttttaatcattacgggtattattttttaccgatgcgctttcctaccccttattgtactcattagggattagatctattcaaaaataaatatgggcgattttagataaactaaaaccgcccatattaaaaggcaaattacttattttcaggtgaactgagcggtcctggtttaccgattaaatacccctggaccaggtcacagcctaatttgcgtaaggactgcagctgctcttctgtttcgacaccctcggccacgatgcgcatatgcaggcttttacccatgctgataatcagccgcacgatatcgaggtcatctttctgatcgggaatgttaatcacaaaagagcgatcgatttttatcttatcgaacgggaagtagcttagccgcgatagcgaagaatagccggtgccaaaatcatcaatggagatctgcaccccgagctcgcgcagctggctcaggatctcgagagaacgggtattttcgttaaagacgtcagactcggtaatttccaaatccagccgatacggatccagcccggttgttcttaagatggttaccacggtatcggtcagtgaattgttcattaactgaaccggcgacacgttaaccgacactttgagcggcgacgaccagctggcggccgcttcgcaggcggttctcagcacccattcgcccaattgattaatcaggccaatcttttccgctaccggaataaattcggtcggcgggacgctgccgcgcagcggatgaaaccagcgcaccagcgcttcgtagccgtagatttcaccgttcatggtgtcggctatcggctggtagtaaaccctgaactcacctttgttcagcgcctgcatcaggtcatcttcaaaggatttattctcctgctggcgctgaagcagtccgggacggaatacctgaacgttgccggaaccctcttttttcgcttcatacagcgccaggtcggcacatttgtataaatagtcggtacggctttccccgtcagagatgacaatcccgatacaggcgccaatctggatcagcgagtcgtaaatctgatacggctggctgatcttttcccggatcaccttcgcccgctccagcgccatctcttcggttaaatcatgggaaaccagggcaaactcgtcccctcccagccggtagagcgtttctgacgttttgcgaaaaaaggagagacggctggccaaatcctgcagcagcttatccccggcatcgtgaccctgggtatcgttgacgtccttgaaattatccaggtcaaacagcatcacgaccgccgagccgttatagggccgcacctgattgacgacctcctgcagacgttgccagaaagagagacggttgggcatcccggtcagcgaatcatgataggcatcgtactgcagacggcggttctgcacctgaagcttttcttttgaggcctgcaggtcggtcgccagtaatttcatccgcacgtgggcgcgacgcagggtgttattctgcttcagcatcaacagcccgagcgtgatacagagaacaatcagcagaatggaaatcgccgaatagatgtaatagagattttgtattttatcgtgggtcagattaaccagattaaaatcctgggcgagcgaggtggacgcgagcgaggtcaacggcccgtccagggtactcatctcctgcagcatcagcttcagctgcgctgtcgtcatggtgtccagctgcttatccagccggcccagaagatcaatcaggctgttaactatcgccttacggtgaggatctttgccgataaactttcccaaatcaccctgctgcagcagcgcaatctggctcatcataatttccagacgcaggcgcacctcatcgtggtcgcttcccttcacccccagccccatcgcgctgagtcgcgcctcgaggcgcatgtactcggagactatctgggaaacggaccacgaatcagtataacgggttaatttttgcagctcactttgccgctcatgcaccagataagttatgtaaccggtcacaatgaagagcgacaaaataatggcagtgagtattcgattcaagatcaaacccttactcaattataatcttcgaaacctgccatgccgaacgggaataataaatctgattctgcaattccgggctactgtcgtaaggataaacaataaataagggccctttatcacgaatgcgcatatattcgccgttcatttttaaagccaaaattaccggaaatttatgaaagtcgtccagggggacaatggtggtgtaatcgttgagcgccagcacccgggccgacttgcctttggcgccgactaaatccatgagtttactgagggaaatgccgtcaaagcggacctttcccgaataccatggcgtggtcgtcaccagcgtttccatccccagcttttctaatgcggcgacatcaaaaacggcggtatcgccctcattcgtattagtaatcaggccggaaatagttaaaacgggtttgccgacaggcgctggcagtttttctgcaaaagcggaaggcgaaaccatgacacaaaataaagctgcaaaaattaaacgcatttaactcacccttccgaaattggagacttgttaattgtaaaccatttaagtcatttcttaaaaggtgtccccgttgggttcaaaaattaaaattaaaaacaataagcgaagtcctaagctcgcattctgaacgggctacaagggcgttcatcccctggcgaagcaaacgctttatgcctttaaacgcccagagcaggtaaaaatcttttcacatgcccttctgcgcggtagtctcaggacaggcgcgaattcggaaagcgtctcattccaataattaaaaactcagcaacagacaggacaggtatggactcaacgttaatttctcagcgccccggcaaggaggcatgttcactcaaccgcgcccgcagagcggcctggggcagcttcgccggggccgtggtcgactggtacgactttcttctctatggcatcaccgccgcgctggtatttaaccgggaatttttcccgcaaatcagcccggcgatgggtaccctcgccgcctttgccaccttcggcgtcggcttcctcttccgcccgctgggcggcattatcttcggccatttcggcgatcgcctcgggcgcaaacgcatgctgatgctgacggtatggatgatggggatcgccaccgcctgtatcggtctgctgccctccttcaaccagattggctggtgggcgccggttctgctggtcctgctgcgcgccgtccagggctttgcggtgggcggcgaatggggcggcgcggcgctgctggcggtagagagtgcgccgaaaaataagaaggcgttctacagcagcggcgtgcaggtgggctacggcgtcggattgctgctctctacagggctggtgtcgctgataagctcctgcaccaccgatgaacagttcctcagctggggctggcgtctgccgttcctgtttagcgtcgtgctggtgctggcggcgctctggatccgcaacggcatggcggaatctgccgaatttgaacagcagcagcgcgaacagcagctgcagccgaagaaaaagcggctgccggtcgtggaagcgctgttccgccatccgggcgcgttcttaatgattatcggcctgcgcctgtgcgagctgctgacgatgtatatcgtcaccgccttcgcgcttaactattccacgcagaatctcggcctgccgcgcgagctgtttcttaacattggcctgcttgtcggcgccatcagctgcctgacgatcccctgcttcgcctggatggcggaccgctttggccgtcgccgcgtctatatcaccggggcgctgatcggcaccctcagcggcttcccgttctttatggcgctcgaaagccagtcatacttctggatcctgtttttcgcgcttatgctggcaaatattgcgcacgatatggtggtttgcgttcagcagccgatgtttaccgaaatgtttggcgccagctatcgctacagcggggccggcgtggggtatcaggttgccagcgttgtcggcggcggtttcacgccgtttatcgccgccgccctggtcaccttatccggcggcgcctggcatagcgtcgctatctacttgaccgcaggctgcctgctctccgcccttacggcgatgctgatgaaacccagccgccatggcgaatagcgtcgataaggagaaatcatgattcaggaaccctgctggccgctgcgctttagccaccagcagctaccggttggttactttgccgatcccacccttgccgagcagccgctgtttgcccgggcgggcgacggtgaggcggtggctcagctctggcaggccccgcaggggtttgtggtgcccggaagctaccggaaatttgccgaactcccggcggtgagcgagcagttcgccggccagggatggccggtctggcagcgccgctccggcggcgggctggtgccgcaggggccgggaattgttaatctcagcctggcctggccggtctatcactcgctgggcgaagccgcagagccgatttatcttttcctctgcggcctgttgcagcgcacgctggcgacctttggcgtggccagccactgccgggcggtcagcggttcattttgcgatggtcgctataatctggcctgcggcgagggcgagcatgtgcgaaaaatagccggcacggcccagtactggcgaccaatggcggaaggccagggccatgtggttctcgcgcacgcggtggtattgctggatgccgacctggcggcggctcaccgggcggccaatgatttcgaagcccggcttggcagcgggcgggaataccgcgccgataaaaccgtgaccctggcggagctggtttcagaaggcgccgatttgatgccccgctttcgcgaggcgctgacgcagcagctggaaaatatcagctgaaggtcgccttcagatagcggctaaacgtctctaccgcccgcgatacgcgcggcgtgtaggggcgaatgacgtacagactttccgcaaacgcatccaccggccgccatcccggcagcagctcctgaaccagcccgcggccaatcgcctccctggcgctaaaatccggcagtaaggcaacgcccagccccgccagcaccgcgtcgcgcagggattcgctgttattggtggcaaacggcccctgcaccttcacgctcacccgctcgtcgtcgcgctcaaaggtccagtgcgggctttgcggcccgcgcgggtaggtcaggcattgatgctgacgcaacgcgtcaggcgaatcggggcggccaaagcggcgaatatagtccgccgaggcgaccaccagggtagccgtacggcacagcggccaggccacgtgggtctccggcagcagctcgcggcgacagtggcgaatagcaaggtcgaacccctcgctggcgagcgacaccagtcggtcggtcacctccagctggagatgaagctgcggatgctggtgcagaaaaggggtgatggccggaaccagctgctgtcgagagaacgccaccggcgcggtcaggcgcagcgtaccgcgcagggggccgccttcctcgtcgcaggtgccggtaaagatctcgcgaatctgcccaaacggctcgttcagctccgccaccagccgcagaccatcttcgcttaaggtcacgctgcgggtggttcggtgcaccagagttttaccggtaacccgctccagctcgctaattttctggctgatggcggatttgctgaccgccagcttttccgcggcgcgggtatagcttttttgctcctccagcaccgtaagccagtacaggtgggtccagtaaatttccgggcggatctcgcgcatagtaattgttcacaggtaaaaacaatgagttcaaatatagcggtttttgccggcttcagcacgggttagcatctctctcactaaggtaacccgacaataaggaccatctgctatgccattactgacgtttgatatcattgaaggacgcagcgaaaacgagatcaaaaccctgctggatgcggcacatcgcgccgtggtgcaggcgttcaaggtgccagagcgcgatcgctaccagattgttcacgaaaacaaagctcatcatatgattattgaagataccgggctggggctgacgcgaagccgggacgtggtggtggtgagggtatataccagcccgcgcagcgaagcgcagaagcagcttttttatgccaccctgcaggctgagctccgggagcactgcgggctgagcggcgatgacctgatgatctcggtaatcagcaaccacaaaggggactggagttttggctgcggcgtggcgcagtacatcaccggcgaactttagccctggcggcgatgggactggcgcacgatgggttccccggtgcgccaggtcgccgtcggcccttcagctgcatcgatgagccgattcaacgcctcttccaccagccgctcgcgccgctgatcgtaagtagtaagctgccattctggcgccgccgcttcatcgatattatcgaaaccgacaatacccatcgttaaatcgcgctcgcgcagcgcctgaagcgcgcctatcgccagaatatcgttttcacagaacagggcatccactctttcgcctgcggacgtcgcgtccagatactcgctcatcgccgcatatccccgggtacgtaaatactgtccggcaaccagcagagtatcaagccggcaacctgcctgctccagcgccgcttcgtacccttccatcctcattaaatggtgcgaggcggtatccggccctttcatatagccaaaagtgcgatgcccctgcgccagcagcagttcggcaagctgttttccggcaatccagccgtcaatattgaccacctggatttccggatgatcggtattacggccaatctgcaccagcggaacgcgatgaatttcagtggcaatcgcgatgagttccggcgtcaggaccgtggccataaacaagataccatcaacctggagctggtaagccagcgccatcgccgtgcgggtgttttcttcgtcggtaacgttaatcaccagcgccatgtagccgcgattctgcagctggcgggtcacttcgttaagcagtagcaccatattgggattgcgcagctcgtctaccgccacgccgataatatgcgttttcttttgcgtcaggctacgcgccagtaaatttggtcgatatcccagaatattagcggctttcatcacctcttcccgggttttgggctggatagaagccccgggggtaaatgcccgggaaaccgtccatttggagacgccagccagtaacgcaacgtcgctggcggtcgctttttgtcgtttaggggcgctcatactcggttttaacgttcctgataaaaaacatccaatagaacgtaaaatacagcaagataaaatccgctcaacaaaaaacgcgccgcgttctcccgccccccggagggaaaacgcggcccgttatcactgacttaatgtggcgttgagggcatcaatagacgtccgtagccctgcttcaacgctcatcgtcaggtcctccatctccagcgacacataaccgttatatccggtcatgcgcagcaccgagaagaactctttccaccacttcaaatcctgtccacagccaaccgccacgtagttccaggtgcgggttttggtctgcgtaaccggctggtattccagtaagccgtcgacatccgccagcccgcgttcaatacgcgcgtctttgccgtggacgtgataaatcaccccttcaagcttacgggctgcggcaatcgggtctgcccccatggcgatcagatgcgacggatcgagattcatgccgatgatgtcgccaaccgcctcacgcaggcgcagcagcgtgctcgggttgtaaaccagctggctggggaattcctcgagggcaatctgttcgatgccgtattcagccgcatggcgggtaaaagcctgccaccagggaatagcaacctcgttccactggtaatcgatcacgcctggcatatagtccggccaggaaaccgtcgaggtgatccagttagggattttatcgtccggcccgccgcccggcaggccgctcatcatgactatctttttcactcccagcttcgccgccagctcgacggtacggtagctgctggcggtgtgcttctcgccaagggcgccgggggccagcgggttacccgaacagttcagcgcgacgatctccattccgcgcttttccagctcgccgcgaaacgccgccagcgctgccggagaagccagcagttcttcagttttaacatgcggacaaggcgaccagccgcctgcggtcatctccacgccctcaatgccgtactgcttgacgcgatcgagcatttccgggaacgccaggccggcgagaacatcggtacagagtgccagtttcatattctatccttcttaaatgagtgtccttcgaggatctgcataaacgcgtctttgctgtcggcgctggccagcagcgtggttttcacttcgtcatcaagcaggtctgccagatccgctataacatcaatgtgttcattgttttttgccgccacggcgaccacaaggaaggccactttaccctccccccagcccacgccatccggaaactgaagcagctggaaaccggtttgccgcaccagatcaataccctccttgctgcagtggggcatggcgacccccgccccgagccaggtagagagcgccttttcgcgctccaccattgattcaaaaaaaccctcgctgacgtagccgctggcctgcagggaatccgcggcaatacgcagcgcctttttctttgaattcgcccgacagccaataaaaatatcttctggtttcagagttaacatgcgcctctcccttcgttaatgggtcagcggtagagcgccggacactccggcagagagacggcgtgcttttcgccatccttcagcgacgccaggccggcatcgcataccatcgccacgacaaatccgtcccacgatgatggcccgctcatctccgcccccaggtttacccggtcaacgaaattctgcacctcgcgatcgtaggcggtggcgaaacgttccatacaggttttggggatagcgcggctataaccctgcgccgaacggacggtggtaagtgcctgttcggtcaacgcgctgatggcattttcgccaatcacttcacagcgaatgtcatagccgtaatcgcagttaacaaacagctcatcatcaatacgtacgccggattcagtttcaaaaatcacaatcaacggatcctgcagatgcgcgcaggctctgcgcgttttcttctgcggtttatcgacgcgcaccgaaacgatattttcgttaagcagatagcggataatatcgatttcatgggtcgccgaatcgttaatcgccatctccagggtgtagctctccggcacggaggcgttgcgatgggcgcagtggatgagcaatatttcccccagttcaccgctatccagagtggcttttagctggttgtaccccgggtcgaaacggcgcataaagcccagctgcagcatacgtttgccgtaggctacttcagcatcaataatcgctttggcttcattggcggtcggggttagcggcttttcgcaaaacaccggtttacctgctttaatggccgccagaatttgttctttatgtaccgggccaatagagcaaataaagatcgcatccacgtcgtctgattgaatcatctcgactgcatcgtaatagggctgagcgccatattcgcgggcaatagcgtcggtcacattacgattgatatcgcagacggcgctgaccctggcgttctggataaccgtctggaaacgctggagatggtcgcgcccaatcatacccaaaccaattaaaccgatattaactgtcatatattcctccacgttgctaaatcagaatctgaatttttgttcaatttgttcgagggttaacccgcgggtttccggcaggaacttcaccagcagaatcagcattatgacgttggtagccgcgaagaagccgaaggtcattccaccgccgtagctgttgagtaaaatcgggaaaatagactgaatgatgaagtcaaatatccataaaccgaataccgcaaaacccattcccagaccgcgcatccgcagcgggtagatttccgcgagcatcagccagaacaccggtgcgatccaaccctgcataaaggtcaggaacaccagcatcagggcgagaatgatgtagctggcaccggtaaagttggcgtgcaagccgctgacgccatcgacggtttccatatggaagaagagcttgaacgagaggccaatcaacaccaggctaagggtgacgccgatctgtccggtaaagaacattttccgtcgggaatgcctgccaattaacagcatccccagtagcgtggccagaatagagacgacgccattagccacggcgccggtcaccgccgccgcatcgccaagtccggtggctttcagcaccgtcggcgcgtagtacataatggtattcacgccggttacgcgcgttgccagcacaatcatcaggccgatcaaaatcagctgcagtacccattttctcttcagctcgtcaacaaatcggccatggttgatgccaatctggctcacctgctggatatcgcggatctcctgctccacctcttcgggccgacgaatcgttttcagcaccgcaaccgctttgtctatttgccccttacgcacgaagaagcgcggagactccggcattaccagcataccaatccacagcagcgcgccgggtagcgccggaatggccaacatcagccgccagttgtgcgacatgtcgggatagaaattgacaatggaagcgttgacggagtaagcgagaaactgcccggtgacgatcatcagttcgttgaccgtcaccagccgttcacgctgcgcgggtcgcgccagttcggaaatataaatcggcaccgtcactgacgcacagccaaccgccaggccaagaataaagcgggcgattatcatcgacgacatatcccaggcgacggcggtaccgagggcgccaaagataaaaatcaccgccacccacagaatatttttccgccgtccctgtcggtcggacagccagccgccgccgacagagccgattgccgcgccgaataataaaaacgatgtcaccagcccttcctgcagaggagtgaggccaagatcgtttttcatgaaaatcagcgcgccggaaataaccccggtgtcgtagccaaagcacagtccaccgatggttgagacgagggttattaatctgattttcttatcattatctgttttacgactttcagttatcacatgatcggtcattttgttgtcctgtcagggatgagcgttctatcgttttgtttttatgaataaaaagatcacattgccgatccagatacggcagattctggcatcaggaatacatttgcacctttttgcacccgggtgcattatttaacaacttgttatactccaccggattaaaaaatccataacaagttattttgaaatattcatttcgttaagggcgtcaactttttgctcattgaatggccaattttgtcgatcgcagtcacgatccgcagagcttgttgctttcggggggagaaaaatgcctggttcaggctaatggccggggaggaaggcaataaaaaggggaacacgtgggttaatccgcgttccccagagagccgaaaagctcatcaggattgccgggcgctggcgatacgctgtctggctttatgttcaatattttccagcagctcctgcacgtcgtcttcatcgatatcgagaaactggccgtccagcagggccgcatgaatatcatcgcgggtcaccgacaggcccagcggtacggctttggcctttacctcttccgcggccagcgggtgcgggtagcgtcgtcccaccaggttgttgaagacgatggccagcagcgccagcatcagggaattgagcaataccggcgtcagaacaaagtggtagccttcactctgcacccccgccccgccgaggatcgccgttaacgccaccgccccacccggcggatgcaggcagcgcaggaaatacataccggcgatcgccagccccgccgccacgccgcaggccagcgccaggttcgggatcgccattcccacggtcacgccaatcagcgccgagagcacgttgccgccgacaatcgaccacggctgggccagcggactgctcgggacgccaaacagcagcactgccgatgcgcccattggcgcgataaaccagatattgacctcgcctaacagccagtggctgaacatgctggtcaccgccagtcccgtcccggcgccgagagaggccagaacaatatgttttctggcaaccggcagggcgtgcggcttgaggcgaccgaggaaaatgcggatccgcgaaaagagcgatccgggtaaaacgcttaacatcgtgtagctcgcttacgtcataataagaacttatgtttcattttctttttttaaccttattttaacaaccatgtctttgtcgtggcttttcgtcattcattttgtgaatgtaaaaacggcgcgcgctacgttaaaatcccctcacctctgggtatcagcattctatggattgaaggtcaaacacgttgaataacaagataaaattagagaaagagatcgcatgggccagtcagaatatgccgcgcaccctgcgtcaggtcgccgccctgccggatctcagccaggtgcgtctcgcctgctgtatgcacctcgatatgaaaatgatccccctggtgcagggaattctggagaaaggggcgaaggtttttcttaccacctgtaacccaacgacggtgcaggatgacgtggtcgcctggctggtggagcgcggcgcggaagcctgcgcctggcgggatatgagcgacgccgactggcagcaatcctgggaaaaagcgattgcctggcagccgacgcatctgtgcgaaatgggcgcggatattaccaccctactgcatcagcgcggggagtttggcaatatcgtcgcgggccttgaggcgaccggctctggcgttagccgcctgggcgatattcgccccggctacccgatttttaactgggatgatttgccggtaaaagagggcctgcacaaccgtcatatggtcggcctgaccgcctggcacacctttttccagacgacccacctgaccctgcatgagaaaaaagtgctggtcatcggctatggtctggttggccagggcgtagcggcggcggcgaaggccttcggcggccaggtgatggtagcggaaatcgacccggcgcggagactacaggcggcctacgatggctggcacgtcgttgaattacaggaggcgattgcctccgcggacgtggtggccacggcgaccggcggtaaaaaagtcgttaaccgccaggcgctggataagtccaaagacggggtgtttattctcaacgtgggtcacgtggcggaagagattgactgtgagtacctgcgccagttccgtcatgaagaggtcatgccctgtatcaacgcttaccggatgggtgataaaaccgtttatctgatggcgaacggttcaatgctcaacctgaccgcgggctttggcgatagcctgaacgcctttgacgtgaccctggcggtaatggccagcggcattcagcatatcgtgaccgacggcatgacggcaccggcggacgtttacctcctgccacagagcgtatggcaaaaagcgctgtaagcacgtgcgctgaataattttcccggaggcggcgcgctgcgcctgtccgggctaccggcccgcagacagcggtggacttgtagcccggctaagcgcagcgccatcgggaagaaaccacgccaatccatcactccggcacattccccgcaggcggcgcgctgcgcctgttcggactaccggcccgcagacagcggtggacttgtagcccggctaagcgcagcgcgagccggggagaaaccacgcctattcatcactccggcacattccccgcaggcggcgcgctgcgcctgtccgggcaccggcccgcagacagcggtggactggtagcccggtcagcgcagcgccaccgggaagaaagcaatgcctacagcagggccagcagaaatatgacttcgcccagctcaatcgccgcgcctaatgtgtcaccggtttgcccgcccagggtacgcttcagcgcctgacccagcgcccaaaccagcaccagagtgataagcgccgcccgcagaccgttgaccccgagcagcagcgtcgccagcgccagcgcgatccccatggtaatcagcatctgccgcagcgtgattttgccgataaataagttgcccagcccctcttcccgggcgtagcgctgacgatacatcagcagcaccgccataccgcggccgacggcgcaggcggcagccagcgcggcaagcgccgacgtgccgcgcagcgccacttcgctgaccaccagcactttggcaaccagcacaaaaatcagcgccagcccgccgtgagtgcccagccgactgtcgcgcatgatttccagcatccgctcgcggcggcgggcggaaaagatgccatcgcaggtatccgccagcccatcaagatggaacccgccggtcaacagcgccagcgccagcacgccgagcagcgcggcgagcgggccgccgcaccacggctgcagcagcatcacaacggcgccagcaatcgcccccagcagcagccccaccaggggaaatgtaatgatactgcgttgatattgttcaatttccagcccctgggataaacgcgccgggaccggcaggcggctgataaatgataatgcggtaaaaaaagacttaatcattgagtgatgactcctgtcgataaaccccgcggcagcggttattcacgcccgccaccgaccgtgacctgacttatccgcgcggctgccgcgcggagaaagcctgcccgcgttcttccagccgccagtgggcaagccgggtatcacggtggtgttgaatgcgcacggccatttggttgtcggagagccgggaggtagcgatgaagatcgccgaaacgaaagagttgagtaaagattcggcatcgcggcgttggccgctaagcgcgtcgccggtcatcagtatcatcgcggcggcacctgttgcagggacagcatgagataaacccttccgatatcaatatgtttacggcggaagtataccaaattcctgggtaaaggttcagcgtcgcgcgggcgtttttgctaaggaactgtgaggtcacgcaagaggaagaagaggaactccggcggcgagcgccgccggagcgcattaacggggcttactcggcagatttatcttcgactttcgcttcgcccatcgctttcagctttttagagatatcgcgacgttctttggagatctcggcgtttttgatgatgtaatcgtcaacgcgatcttcgtaatcgctcttcatgctggcgatgatgccctgaatagcttcaacgctcatgcccggcttgatgtagtcgctcaggttgtccagcagcagtacgcgcttctggttatcacggatctttttctcaacgtcctgaatttcacgctgcagtttgttcttacgacggtacaggcgaacaaactccagtacgtcctggaaagaaggcttagttgtttccatttttatacccctaatatttgagattcggattcgctaaagcgactgctacatagggctaacataactgttagcagccgctgatgacaatgttttttcctttgccgttatcataaccctaaacgctgctgaatcgaagcaagcgatggaaaaaccacgtgagtctggtctttatttacgcaacgcacggcagattaaatgcgacagcagttcgagctggcgcgccagctcgatagttaaccagacataaccgtgaatgggcgtttcggagaaattgtcgtcctgctgctctttgatgagctggcgcagttcggcaacgatttcgttgagcttttcattgttggcaagaatcggctgcggattgccctcatacaatgcgtgggcgatagtcagcaatgtttgctgggtcatttgctgagtttcgcgcagcgtatgagcgttaagcatcacgaagtggccgggacgcgacgcccagtaggcgttgatttgcagctccagcatgcacaccaggttacggctaacggtctggatcgcctcaaagatggccttctggatatgcgtctctttgctggcaggagtaattaatccgcgcattttcaccacgtcgttaagcaccttctgcatatgcttttccagacgcggacgctcaacgaggttcggcgagaagcccgcctgatacagacggttgaaggcggtgacgtagctggccatctggatgcgccagtgcaggaaagcccgctgcggccagataccggtaaacagcatcgccagcagggagccgaagataacgtcgccgcttcgccacagcgcggtggtcatgtcgcccggcggcgcgccgaccactaccgccagggtgatgccgatcagcagcgcctggtagggctttttgcccagcgccagccagccgcagaggaacatcgccaccgcgcaccacagcagcataatgggcagagagataagctccagcttgagcgccaccagcccgagcgccgagccgaggatcgtgccgccgatacgttcaaacgcgcgcggtacgacgtttccccagaaggagataggccccataaccaccaccagggtgatgaggggccaggtgccttcaggaacgttaagcaggcgcaccagcacaaaggtgagcacaaaggccaatgctattcgcacgccatggacgatgcggtaatggcgatacagccgaatttcaaatggcttaagtgatttatccgcgcgcacaacctactccgacacaacgaaaaggccaattgtaactgctttttcgccgcaagcatcacgcgaatgtaataaaccttgtcaaacgaagggacaatgttctacttcacggccggctcgaccgcgacatacatatcaatatcccagtagccgtcctggttaccatcgttaagatagacttcaaaacagggcttcatcgccatctgatgggttttgctttccatcaggctctcgaagaactggtaccacggcgtcgcaaagtcaaaattctcgactctggcacgggcaaccgcataatccccgccggcgatttcggtcatcatcacgccttcgctaccctcaggaatctggtagtcgtccgccaccgtgacggcggtatcgcagcgcagcttttccgccgggacttcgtccgggttgtcgtagtaaacggccacccactcctgcgccggcacctggctgttatcgacccacatcatcagctgttcaaacccctgttttaccgtctgctcccagggaccgaccagatgaaaaccagcaattttcttcttgcctacggatttaacgttatagtccatgctgcctccactgttgataaaatactgtatgtatatacacataaattagcagtgctatcacccacagtatgtgcggcaattcacaaatccgcgcggcaagaagatgaaaaaatcgccgccatacgattataaactgaacggtagctcaacgccgatgctggccccaacatcgtcgctggcgctgtggttagcgtcggtgtaccacagggaggtattcaggcgtaccgttggcataacatcgccgctccagcccagctgtacgcccttcagcgtatcggcgcgcgggaaggctttattgattcgctggttttttggattgacctcagcgtagaccaaccgcgcgctccagcgctgattatcttcggttaccagctccaccttaccggcatataaacgcccgtcgccgcccatcgcatcgcccagcggatagccctgctggtagtagccgtctttatagataaagtggttatagatgtagttagtacggcccatgttcgagcgggtatcgtgggcttccagataccagttaaccgcattgctgttccactggtgatgcccttccacaccgccaagatagaggtgcgccgagggtaaatatccggcttcgtcctcgccgatcatctggccgtaaatgctcaccggccagccgagggtgggcgccagcttcagcttgaaatcaaaaccggccagctggttgccgggatcgtcggccgagtcgccggtgttatcattgccggtgaggccgtcccagaagctgctgaatgaggaaggccgcccttcgccgccccactgcataacgcgcgaggctcccagctccagcgaggtgagcggtgaaaaagtcaggcggccgccgaagattttggtatgcggtacggcggcgtactggttcatctggctggcggaaagctggtactgccaggggccaatccagcttagccatgaggtttccggcgcccgctgttcggcgcgctgcagcagaaaaccggtcatgggacgcgcggcatcggagcggatcaggctaccttcatagcccggcccccaccactgggggatttgcccgaacgccagccactggttccacagcttaaccgcgccgtacgcgccgttggcgttcacgctcgaaccgttactgatgcgcttgtcgccttcaacattgccctgcaggtgcagatcccaccattcgccgctgttgttcagggcgagagaaagcgactggtcggcggggtaagattgggcaaacccctgcggcgtgcccggcttatcagtggagctgtagccggtaacgcgcacgtcagctttcagcgcgcttaatcgctgatttacccgacccagtaccacccgctctgcggacgttgtcggatgggcattggccagcgcgcgcttaatctcctcttcgctcagaggccaggtcgacaggctcaacgagagggttccacggtcggataaccaggctaaatcattgcggaattcgttatcggccagaacgaggccggaggcaaaaccagaagtgctaaaaacggcgaacagtcccagagaaagcgcactacgcgcaaagtatttcattttcccagctccatttatggcgcacaagcgccaggctttttcctgaagggtgaccgggtaaggtaatggagtgaaagtaaacgaagcgccaaccgaagcggcataataatcaaacagctacgagatgccgctccgggcggagcggcggagaagttacagtttttgatgcagataatcgctaaagcgcgacagcacgccgcccttgccaacgctttccagcgtcaccagcggccagtgggccaccactttatcaccatcgtaaagggagatttcgccaacccgctgatgggcggcgatcggcgcttccagcactttgttatccagcacgtatttggccttaatgcgcgagacttccgacttcggcagcgctaaccagaagtcctgatcggtccccagcttaatctgctctttatcgccataccagatacgctcaacgccgacctgcttgccgtcctgcagaacctggacggtatcgaagttttgctgcccccagtgcagcagcttcgccgcctgctgttcacgccctttcgggctgtcggctcccatcaccaccgcaatcagccggcgctggccgtccaccgcggaggcaatcaggttgaaaccggcgcccgaggtgtggccggtcttcagaccatcgacgttcatggtcttatcccacagcagaccgttgcggttctgctgggtaatgccgttccaggtcaggctcttctggctgtacatatggtagacgtccggctcgccgtgaataatcgcccgcgagagcaccgccagatcgtaggccgaactgtgctgacccggcgcgtccagaccgtggacggtttcaaaatgggtatcctgcaaatgcagtttttccacgtagctgttcatcagcgcgacgaactgcggctggccgccggcgacgtagtccgccagcgccacgcaggcatcgttgccggagtcaacgatcagcccgcggcttaaatcgcgtacgctgacccgatcgccgggcttaaggaacatcagcgaagaaccattaaagaccgggttaccctgcgcccaggcgtctttcccgacggtgacgatgtcgtcaaaggtgatgcggtggctgtcgatagcgcgatcgaccacgtagccggtcatcagtttggtcaggctggcgggattgcgctgctgatgctcgttaccggcggtcaggatctggccggtggtgtaatccatcagcacccaggaaccggcctgaatagaaggaggcgtcacgttgacgggaaaatcattggcggcaaatgcgcaggaaacgctcgcagcgagcaaagatacagcaataaaaaaacggcctttcaacggcatatcctctaaattgacagattcgccgtcctttttacggaacttctcgtttcaaatcagggtttaattgcaagaaaatatgacatcgccgacgcgggacaaaggggatacccttctgatggcccggcaaatcgtttaccatgaaggctgctcgccaccaggaataatgaacagattatgcaagatagcgccagccagcccggatttttatttcatgattacgagaccttcggcaccagtccctcgctcgaccgaccgtcgcagtttgccgccattcgcaccgatgaagacctgaatatcgtcggcgaacccgaagtcttctactgcagactcgccgatgactatctgccgcagccgcaggcggtcatggtcaccgggataacgccgcaggaggccaatgccaaaggcgacaacgaagccgctttcgcccgccgcgttcacgatctgttcacggtgccgaaaacctgcatcgtcggctacaacaacgtgcgcttcgatgacgaagtgacgcgcaacattctctatcgtaatttttacgatccctacgcctggagctggcagcacgacaactcccgctgggatctgctggacgtgatgcgcgcctgctatgcgctgcgccccgaagggatcaactggccggaaaacgaagagggcttaccgagcttccggctggagcatctgaccgtcgctaacggcatcgaacacagcaacgcccacgacgcgatggccgacgtttacgccactatcgccatggcgaagctggtgaaaacccagcagccgcgcctgttcgactatctttacgcccaccgcaacaagcgcaagctggcgacgctgattgacgtgccgcaaatcaaaccgctggtgcatgtttccggcatgttcggcgcggcgcgcggcaacaccagcctggtcgccccgctggcgtggcacccggacaaccgtaacgcggtgattatggtcgacctggccggagacatcgcccccctgctggagctcgatgccgacaccctgcgcgagcggctgtatacgccgaaaagcgagctgggcgacctgcccgcggtgccgattaagctggtccacctgaataaatgcccggtgctggcgcagcaaaacaccctgcgtccgcaggatgccgaccggctgggcatcaatatccagcgctgtctggagaacgcccagctgctgcgggctaatccgcaggtacgcgagaaagcggtggcgatttttgccgaagcggagccgtttgtgccgtccgataacgtcgatacgcagctgtataacggctttttcagcgatgccgaccgcgcggcgatgaaaatcgtgctcgaaaccgagccgcgcaacctgccggcgctggatatcaccttcgccgataagcgtatcgagcgcctgctgttcaactatcgcgcgcgcaactatcccggcacgctggatgaagccgagcagcagcgctggttagagcaccgtcgccaggtctttacgcctgagtttttgcaggcctacgccgatgagctgcagatgctgtaccagcagtatgcggacgataaagagaagctggcgcagctgaaggcgctgtggcagtacgcgcaggatattgtttgattggcagaaattcccgggttgcggctaacgccttacccgggctacaaacaatggcaggactcgtagcccgggcaagacgcctcgcgtcgcacccgggaacgttgcttagcctttggcgcggctggcgataatcgcctcagccacgttgcgcggggcttccgcgtagtggtggaactccatgctgtaggtcgcccggccctgggacatggaacgcagcgtggtggaatagccaaacatctcggccagcggcacgtcggcgcggataatctggctgccgaaccgctcctccatcccctgcaccattccgcgacgggaagagagatcgcccatgatattcccggcgtactcttccggggtctccacttccacctgcatcaccggttcaagaataaccgggtcggccctgcgcgccccttccttgaagccaaatatcgccgccatccggaaagccatctccgacgagtcgacgtcgtgatacgaaccaaacgtcagggtcgccttgatatccaccaccggatagcccgccagcacgccggtgcccatcgcttcgcgcagccctttttccactgaagggatgtactcgcgcggcaccacgccgcctttggtcgcgtcctcaaacacgaaaccgcttcccggctccagcggttcaagggtcagcaccacgtgaccgtactgccctttaccgccggactggcggacaaatttgccttccacctctttgaccgttttgcggatcgtctcgcgataggtcacctgcggacgcccgatattcgcctcgacgccaaactcacgcttcatgcggtcgacgataatctccagatgcagttcgcccatcccggaaacgatcgtctggccggactcctcgtcagtatgcagacgaaacgacggatcttccgccgccagccgctgcagggcgatacccattttctcctgatcggctttggttttcggttcaatcgccagcgaaatcaccggctccggaaactccatccgttcgagggtaatcaccgcatccgggtcgcacagcgtgtcgccggtggtgacatccttcaggccgacgcaggcggcaatgtccccggcgtgcagttcgtccacctcatggcgatcgttggcctgcatcagcacgatgcgtccgatgcgctctttcttacctttcaccggattccacaccgcatcgccttttttcaacgtcccggaatagacgcggataaaggtcagctgtccgacgtagggatcggtcatcagcttgaaggccagcgccgagaacggctcgtcgtcgcccggatgacgttcagcggcctgccctttttcatccacgccctgaatcgccgggatatccagcggcgacggcatcagctcaaccaccgcatcgagcatccgctgcacgcctttgtttttaaacgcgctgccgcacagcaccgcctggatttcccccttcaccgtgcgctggcgcagaccggcgacgatctccgcctcgtccagctcaccggtttcgagatatttgtccatcagttcgtcgctggcttccgccgccgccgagaccattttctcccgccacagacgggcggtttccacgaggtcgtcaggcaccggcgcatagctgaaggtcatcccctgggtggcgtcatcccacaaaatggcgcgcattttgatgagatccaccaccccggtgaagtgctcttcggcgccaaccgggatcgcaatcggcaccggattggccttcaggcgatcgatcatcatctgcaccacgcggaaaaaatccgcgccggggcggtccatcttgttgacgaaggccagccgcggaacgtggtatttattcgcctgccgccagacggtttccgactgcggctgcacgccgccgacggagtcgtaaaccatcaccgcgccgtccaggacgcgcatggagcgttccacttcgatggtgaaatccacgtgcccgggggtatcgatgatattaatccggtgcggctcgaagctgcggtccatgccgggccagaagcagctcaccgccgcggaggtaatggtgatcccgcgctcctgctcctgcgccatccagtcggtggttgccgcgccatcgtgtacttcccccagcttgtggctcatcccggtataaaacaggatgcgctcggtggtggtggttttaccggcatcgatatgcgcggagataccgatgttgcgataacgttcgagggggatgggtcggggcatgatgcgtccttagtcattgtgactgttaacaggcggccggaattggccgccgttcatataacggcatctatcatagtacaactgtacgagtatattcgaactatttttgctatcgttactattggtgaagctgcgacgacccgcgtggctttagaaaagcagtttcggtatattaccggccagccgccgatacaggctgctgctcacggagctgcgccgccgccgacacaggaatattatgatcgccaatcaccccgaacgtgaacaaattcgcctcgaaaatgtccttttcgctctcggcaacccgctgcggcttgagattatccgtatccttgccgacggcagcgagcagagctgtaacgccctgcgtcatgaagatgtggcgaagtcgaccatgacccaccactggcgcgtcctgcgcgacagcggtgtgatctggcagcggcctcaggggcgggagaatttgatttcgctgcgccgggaagatttagacgcgcgctttcccggcctgctggatacgctgcttaaggtcatgcagcacgatagctaaagcctgcgcgccggcccctactcctcaccggccagccgccgatactgggcaaagcgggcgcgcgcatcctcctcggttctgctaaaaagcgcatccgcgagatgcggcgtcgttttgtgcagcgaggcgtagcgcacttcgccaagcaaaaagtcgcggaagctctcctccggctcttcggaatcgagcataaacggcgtcttgccctccgcttcccgctgcggatgatagcgccacaggtgccagtatcccgcttcaaccgcccgtttcgcctcgcgctggctgcagcgcataccggctttcagcccgtggttaatgcaggcggcgtaggcaatcaccagcgacggtcccggccaggcttcggcctcggcgatcgcccgtaaggtctgatctttatcggcgcccatggcgacctgggccacgtacacattgccgtagctcatcgccatcatgccgagatcttttttccgcgtgcgtttgccctgcgcggcaaacttcgcgatggccgccaccggggtcgatttagacgactgcccgccggtattggagtaaacctcggtatcaaacaccagaatattcacgtcttccccgctcgccagcacgtgatcgagaccgccgaagccgatatcgtaggcccagccgtcgccgccgaaaatccactgcgaccggcgcacaaaatagtcgcggttctgccatagctgctccagcagcggcacgccctctttttccgccgccagccgttcgctgagccggtccgcgcgctcgcgggtaccctcgccttcatcctgcttcgccagccactggcgcattgcgtcgctaagttcgtcgctgactggtagcgccagcgcggcggtcatctcctcggcgatttgttgacgcaccgcctggccgccgagcatcatgccgaggccaaactccgcgttatcctcaaacagcgagttcgcccatgccgggccgtggccgcggtggttggtggtatagggaatcgacggcgcgctggctccccagattgaagagcagccggtggcgttagcgattagcatccggtcgccaaacagctgggttatcaggcgggcataaggcgtttcgccgcatcccgcgcaggcgccggaaaactccagcagcggggtttcaaactggctgcctttgaccgtcgtcttccggaacggattgctcttcggcgtcagcgccagcgcatagtcccagaccggcgccatctggcgctggctatcaagtgactgcatttttaacgccttgccgcgcgaaggacagatatccacacagttgccgcagccggagcaatccagcggcgaaatagccagatggtagtggtacgccttcgctccctgagcgggtttgctcagcagctcagccggcgcggcgtcctgctcttcgccgttgagcagcgccgggcggatcgccgcgtgggggcaaataaaggcgcactggttacactgcgtgcagccctccggctgccagaccggcacttccagcgcgatcccgcgtttctcccaggcggcggtgcccgagggaaaagtgccgtcttccatgccgacaaacgcgcttaccggcagctggtcgccgcactggcggttcatcggctgcagaatatcgcggatgaaatccggcatcatggctgaagcctgcgccacgggctcatccagcgtcgcccagtgtgccggaatggttacctgatgcagcgaggccatgcccagctcgatcgcccgctggttcatctcgatcaccgccgcccctttgctgccgtagcttttttcaaccgcctgcttgaggtaatccgccgcggtctgcgggtcgataatcgccgccagcttaaagaacgccgcctgcatcagcatattaaagcgcccgcccagcccgagctcgcgggcgatatccacggcgttcagggtataaaaatggatattttcccgcgccagatagcgtttaaagccgaccggcagatgctgctccagctccgcatcggaccagctgcagttgagtaaaaaggtcccgcccggctttaacccatccagcaggtcatagcgctcaacgtaggactgctgcgaacaggagataaaatcggcccgatggatcaggtagggcgaattgatcggccggtcgccgaagcgcaaatgcgaaacggtaatgccaccggattttttcgagtcataggaaaagtaggcctgcgcgtagagcggcgttttgtcgccgatgattttgatcgcgcttttattggccccgacggtgccgtccgagcccatgccccaaaatttacaggcggtgatgccatcatgcgagaccgccagcgtctgctggcgcgagggcaacgaggtaaaggtgacatcatcgacaatgccgagggtaaagccgtccatcggcagcggtttattgaggttgtcaaagaccgccgcgatatcgttgggcagaacgtccttaccgccaagcgcgtagcggccgccgacaatcagcggcgcatcgtcgtggtggtagaaggcgtttttcacatccaggcacagcggttcggcctgagcgccgggctctttggtgcggtcaagcacggcaatgcgctgtacggttttcggcagctgagcgaaaaagtgggccagcgaaaaagggcgaaacagatgcacgctgagcagcccgaccttctctcccgccgcgttcagcgtatccaccacttcctgaacggtgtcgcagaccgaccccatggcgataatcacccgttcggcatccgccgcgccggtgtagttaaacagatggtactcccggccggtgagcgcgctgatttgcgccatatagctttcgacaatgtcgggcagcgcctgataaaaacggttacccgcctctctttcctggaagtagatatccgggttttgcgccgttccgcggatgaccggatgatccggatgcagcgcgttacggcggaagctgtcgagcgcggcccggtccagcagcgtcgccagctggtcatattccagcacctcgattttttgaatttcgtgcgaggtgcggaaaccatcgaagaagttaacaaacgggatgcgtcccttaatcgccgccagatgcgccaccgccgacaaatccatcacctgctgcacgttgttctccgccagcatcgcgcagccggtctggcgaaccgccatcacgtcctggtgatcgccaaaaatattcagcgaattggtcgccagcgcccgggcgctgacgtgaaagacgcccggcagcagttcaccggcgattttgtacatgttggggatcatcagcagcagcccctgggaggccgtataggtggtggtgagcgccccggcctgcagcgcgccgtgtaccgcgcctgccgcgccggcttccgactgcatctccattaagcgcaccggctggccaaaaaggttctttttcccctgcgccgcccactcgtcgacgttttccgccatcggcgtggaaggggtaatggggtaaatcgccgcgacctcggtaaaggcataagagatccaggccgccgcggcgttgccatccattgttttcatttttccggacattgttcaatcctcgaaggtgagaggcatcttcgccgcctcgaataagcggcaaacccagttgttgcctcaagcacagcctgtgccagctcgcgggtgaccgaagagttagcgcgaattcaacgcgttatgaagataaaggcaacgcagcgcgccgagagattgcgtggaacaagacacaggggacgacaagctgttgaacagacgacaaaccgccacaatggccccggcaggcggaattgttctgtttcccacatttggtcgccttattgtgccgttttgttttacgccctgcgcggcaatgaattaataaattcataaaaatcagataaataaataaacaggcacggctggtatgttccctgcacttctctgctggcaaacactcaaccacaggagaagtcaccatgaccatgcgtcaatgcgctatttacggtaaaggcggtatcggcaaatccaccactacgcagaacctcgtcgccgcgctggcggagatgggtaagaaagtgatgatcgtcggctgcgatccgaaggcggactccacccgcctgatcctgcacgctaaagcacagaacaccattatggagatggccgcggaagtcggctcggtcgaggatctcgagctcgaagacgtgctgcaaattggctacggcgacgtgcgctgcgcggaatccggcggcccggagccaggcgtcggctgcgcggggcgcggcgtgatcacggcgatcaactttcttgaagaagaaggcgcctacgaggacgatctcgattttgtcttctatgacgtgctcggcgacgtggtctgcggcggcttcgccatgcctatccgtgaaaacaaagcccaggagatctacatcgtctgctccggcgaaatgatggcgatgtacgccgccaacaatatctccaaagggatcgttaaatacgctaaatccggcaaggtgcgcctcggcggcctgatctgtaactcacgccagaccgaccgtgaagacgaactgatcatggccctggcggaaaagctcgggacccagatgatccactttgtcccccgcgacaatatcgtgcagcgcgcggagatccgccgaatgacggtgatcgagtacgaccccgcctgccagcaggccaacgaataccgcaccctggcgcagaagatcgtcaacaacaccatgaaagtggtgccgacaccctgcaccatggatgaactggagtcgctgctgatggagttcggcatcatggaagaagaagacaccagcatcattggtaaaaccgccgccgaagaaagcgcggcctgagcacaggacaataatgatgaccaacgcaacgggcgaacgtaatctggcgctgatccaggaagtcctggaggtgttcccggaaaccgcgcgaaaagagcgcagaaagcacatgatggtcagcgatccgcaaatggagagcgtcggcaagtgcattatctctaaccgcaaatcacaacccggcgtgatgaccgtgcgcggctgcgcctacgccggctcgaaaggggtggtattcgggccaatcaaggatatggcccacatctcgcacgggccggtcggctgcggccagtattcccgcgccggacgacgcaactactacaccggggtcagcggcgtcgatagcttcggcacgctgaacttcacctctgattttcaggagcgcgacatcgtcttcggcggcgataaaaagctcagcaagctgattgaagagatggagctgctgttcccgctcaccaaagggatcaccatacagtcggaatgcccggtggggctgatcggcgatgatatcagcgcggtggccaacgccagcagcaaagcgctggataaaccggtgatcccggtacgctgcgaaggctttcgcggcgtgtcgcagtcgctagggcaccatatcgccaacgacgtggtgcgcgactggatccttaacaatcgcgaaggacagccgtttgaaaccaccccttacgatgtggcgatcatcggcgactacaacatcggcggcgacgcctgggcctcgcgcatcctgcttgaagagatggggctacgggtggtcgcgcagtggtccggcgacggcacgctggtggagatggagaacaccccattcgtcaagctgaacctggttcactgctaccgttcgatgaactatatcgcccgccatatggaggagaaacatcagattccgtggatggagtacaacttcttcgggccgaccaaaatcgccgaatcgctgcgcaaaatcgccgaccagtttgacgataccattcgcgcgaacgccgaagcggtgatcgcccggtatgaggggcagatggcggcgattatcgccaaatatcgcccgcgcctggaggggcgtaaggtgctgctctatatgggcggcctgcggccacgccacgtcatcggcgcctacgaggatctcggcatggagatcatcgccgccgggtacgagtttgcccataacgatgactacgaccgcaccctgccggatctcaaagagggcacgctgctgttcgatgacgccagcagctatgagctggaagcgttcgttaaggcgctgaagcccgaccttatcggctccggcatcaaggaaaaatatatcttccagaaaatgggcgtgccgttccgccagatgcactcgtgggactattccggcccgtaccacggctacgatggtttcgccattttcgcccgcgatatggatatgaccctgaacaacccggcgtggaacgaactcaccgcgccgtggctgaagtctgcgtgattgcccactcactgtcccgtctgttcaccgatttgtggcgcgggaggagaacaccatgagccaaacgattgataaaattaatagctgctatccgctattcgaacaggatgaataccaggagctgttccgcaataagcggcagctggaggaagcgcacgatgcccagcgcgtgcaggaggtctttacctggaccaccaccgccgagtatgaagcgctgaatttccagcgcgaggcgctgaccgttgacccggcgaaagcctgccagccgcttggcgcggtgctttgctcgctgggatttgccaataccctgccgtacgtccacggctcacaggggtgcgtggcctactttcgcacctattttaaccgccatttcaaagagccgatcgcctgcgtctccgactcgatgaccgaagacgcggcggtcttcggcggcaacaacaacatgaatctgggtctgcaaaacgccagcgcgctgtacaagccggagatcatcgcggtttccaccacctgcatggcggaagtcatcggcgatgacctgcaggcgtttatcgccaacgccaaaaaggatggcttcgtcgatagcagcatcgccgtgccccatgcccatacgccaagctttatcggcagccacgtcaccggctgggacaacatgtttgaaggcttcgccaaaaccttcaccgcggactaccaggggcagccgggcaaactgcagaagctcaatctggtgaccggctttgaaacctatctcggcaacttccgcgtattaaagcggatgatggaacagatggcggtgccgtgcagcctgctctccgatccgtcagaagttctcgacacgcccgccgacggccattatcggatgtattccggcggcaccacgcagcaggagatgaaagaggctcctgacgccatcgatacgctgcttctgcagccgtggcagctgctgaagagcaaaaaagtggtgcaggagatgtggaaccagcccgccaccgaggtcgcgattcctctggggctggccgctaccgatgaactgctgatgaccgtcagccagcttagcggcaagccgatcgccgacgccctcacccttgagcgcggccggctggttgacatgatgctcgattcccacacctggctgcacggcaagaaatttggcctgtacggcgacccggacttcgtgatgggcctcacccgcttcctgctggagctgggctgcgagccgacggtgatcctgagccataacgccaacaaacgctggcaaaaagcgatgaagaaaatgcttgatgcctcgccgtacgggcgcgatagcgaagtgtttatcaactgcgatttgtggcacttccgttcgctgatgttcacccgtcagccggactttatgatcggcaactcctacggcaagtttatccagcgcgataccctggcgaagggcaaagcctttgaagtaccgcttatccgcctcggctttccgctgttcgaccgccaccatctgcaccgccagacaacctggggttatgaaggggcgatgaacattgtgacgacgctggtaaacgccgtactggagaaactggatagcgataccagccagctgggcaaaaccgattacagtttcgatctcgtccgttaaccatcaggcgccccgcgtcacgcggggccaggagggagtatgcccatcgtgattttccgtgaacgcggcgcggacctgtacgcctatatcgcgaaacaggatctggaggcgcgagtgctgcagattgagcataacgacgctgaacgctggggcggcgcgatttcgctggaagggggacgccgctactacgtcaatccgcagccggggcgccccgcctttccgataagcctgcgcgcgacgcgcggcgcgttgatataaggagctggagatgtccgacaacgatacccttttctggcgcatgctggcgctgtttcagtccctgccggacctgcagccggcgcaaattgtcgactggctggcgcaggagtgcggcgagacgctgaccccggcgcggctggcgaccctggcccagccgcagctggccgccagcttcccctccgcgacggcggtgatgtcccccgctcgctggtcgcgggtgatggcgagcctgcagggcgcgctgcccatccatttacgcatcgttcgccctgcccagcgaacgccgcagctgctggcggcgttttgctcccaggatggcctgatgattaacggccatttcggccaggggcgactgttttttatctacgcgttcgatgagcaaggcggctggctgcacgatctgcgccgctatccctccgcgcccacccagcaggaagccagcgaagtgcgcgcccggctgattgaagactgccagctgctgttttgtcaggagatcggcgggcccgccgccgcccggctgatccgccaccggatccacccgatgaaagcgcagcccgggacgacgattcatgcccagtgcaaggcgatcaatacgctgctggccggccgtttgccgccgtggctggcgaagcggcttaaccaggagaaccctctggaggcgcgcgttttttaattcctgttttgtgcttgttgcccgctgaccccgcgggctttttttcgcgtatggacgctcttcccgcgtgagggtcaggcattattccgttcaggggaatattccgttcacggttgttccgggcttcttgatgcgcctaaccccctcgctgccagccttccagcaacaaatagccatgccagcgagataggccataaaggatcacttaccgccatcccttgtccgattgttggctttgtcgcaaagccaacaaccctttttctttaaatatcaaggcgccgcttatggagcgcgaattgcatcttccccctcatcccccaccgtcaacgaggtcactatgaagggaaatgaaattctggcgctgctggatgaaccggcctgtgaacacaaccataaacaaaaatccggctgcagcgcgcccaaacccggcgccaccgccggcggctgcgcgttcgacggcgcgcagataaccctgctgcccattgccgacgtggcgcatctggtccatggccccatcggctgcgccggaagctcctgggataaccgcggcagcgccagctccggccccaccctgaatcggctcgggttcaccaccgatctcaacgaacaggacgtgattatgggccgcggcgaacgtcgcctgtttcacgccgttcgccatatcgtcgcccgctatcacccggcggcggtctttatctacaacacctgcgtaccggccatggagggcgatgacctggaagcggtatgccaggccgcgcagaccgccaccggcgtaccggttatcgccatggacgccgccggtttttacggcagtaaaaatctcggtaaccggctggccggcgaggtcatggtgaaacgggtaatcggtcagcgcgagcccgcgccctggccggagagcacgccctttgccccggagcagcgtcacgatattggcctgattggcgaattcaatattgccggcgagttctggcatattcagccgctgctcgacgaactggggatccgcgtgctcggcagcctctccggcgatggccgtttcgccgagatccagaccatgcatcgggcgcaggccaatatgctggtctgctcgcgggcgctaattaacgtcgccagagccctggagcagcgctacggcacgccgtggttcgaaggcagcttctacgggatccgcgccacctccgacgccctgcgtcagctggcggcgctgctggacgatgacgaccttagccagcgcaccgaagcgctgattgcgcgggaggaacagacggcggaactggcgctacaaccgtggcgcgaacggctgcgcggccgcaaagcgctgctctataccggcggggtgaaatcctggtcggtggtctcggcgcttcaggatttgggcatgaccgtggtggcaaccggcacgcgtaaatccaccgaagaggataaacagcggatccgcgagctgatgggcgaagaggcggtaatgctggaagaaggcaacgcccgcacgctgctggatgtggtctatcgctatcaggccgacctgatgattgccggcggacgcaatatgtacaccgcctataaagccaggctgccgtttctcgatatcaatcaggagcgcgaacacgccttcgccggctacaaggggatcgtcaccctcgcccgccagctgtgtcagaccatcgacagtcccatctggccgcaaacccatgcccgcgccccgtggcactaaggagttcaccatggcagacattttccgcaccgataaaccgctggcggtcagcccgatcaagaccggccagccgctcggcgcaatcctcgccagcctcgggattgaacacagcatccctctggtccacggcgcgcagggatgcagcgccttcgccaaagtcttttttattcaacacttccacgacccggttcccctgcagtcgacggcgatggaccccacgtcgacgattatgggcgcggacggcaatattttcaccgccctggacaccctctgccagcgcaacgcgccgcaggctatcgtgctgctcagcaccgggctgtctgaggctcagggcagcgacatttcccgcgtggttcgccagtttcgcgaagagtatccccggcacaagggcgtggcgatattaaccgttaacacgccggatttttatggttccatggaaaacggcttcagcgcggtgctcgagagcgtcattgagcagtgggttgcgccgacgccgcgcccggctcagcgcaatcgccgggtcaacctgctggtcagccacctctgctcgccgggcgatatcgagtggctgcgccgatgcgtcgaagcctttggtctgcagccgataatcctgccggacctggcgcaatcgatggatgggcacctggcgcagggcgatttctcgccgctgacccagggcgggacgccgctgcgccagatagaacagatgggacaaagcctgtgcagcttcgccattggcgtctccctccaccgcgcgtcatcgctgctggccccgcgctgccggggcgaggttatcgccctgccgcacctgatgaccctcgatcgctgcgacgcttttattcatcaactggcgaaaatttccggacgcgccgttcccgcgtggctggagcgccagcgcggccagctgcaggatgcgatgatcgactgtcatatgtggcttcagggccagcgcatggcgatagcggcggaaggcgatctgctggcggcgtggtgtgatttcgccaacagccaggggatgcagcccggcccgctggtggctcctaccggccatcccagcctgcgccagctgccggtggaacgcgtggtgccgggagatctggaggatctgcaaacgctgctgtgcgcccaacccgccgacctgctggtggccaactcccacgcctgcgacctggcggagcagtttgcgctgccgctggtacgcgcgggttttccgatctttgacaagctcggtgaattccgccgggtgcgtcaggggtactgcggaatgcgcgatacgctgttcgagctggcaaacctgatgcgcgagcgccatcaccacctcgcccgctaccgatcgccgcttcgccagaacaccgaatcttcactctccacaggaggcgcctatgccgccgattaaccgtcagtttgatatggtccactccgatgagtggtctatgaaggtcgccttcgccagttccgactatcgtcatgtcgatcagcattttggcgccacgccgcggctggtggtatacggcgtcaaggcggatcgggtcaccctgatccgggtggttgatttctccgttgagaacggccaccagacggagaagatcgccaggcggatccacgcccttgaggattgcgtcacgctgttctgcgtggcgattggcgacgcggtttttcgtcagctgttgcaggtcggcgtccgcgccgaacgcgttcccgccgataccaccatcgtcggcttactgcaggagatccagctttactggtacgacaaagggcagcgcaaaaatgcgcgccagcgcgacccggagcgctttacccgtctgctgcaggaacaggagtggcatgaggaaccggacccgcgccgctagccgtgtcgtttgtgtgacaaagcccacaaaacatcccgacactgtcgggcgcgtcttgtcagggaaaaatataacaaattgaaaatattgcattttattctctggtatcgcatttgctagttcgttaacgccaccgcactcctgcggtgaaccgcgccccggcgttttccgtcatcatccctggagctgacagcatgtggaattactccgagaaagtgaaagaccatttttttaatccccgcaacgcgcgcgtggtggacaacgccaacgcggtaggcgatgtggggtcattaagctgcggcgacgcgctgcgcctgatgctgcgcgttgacccgcaaagcgaaattatccaggaagcgggcttccagaccttcggctgcggtagcgccatcgcctcctcctccgcgctgacggagctgattatcggccataccctggccgaagccgggcagataaccaatcagcagattgccgattatctcgacgggctaccgccggagaaaatgcactgctcggtgatgggccaggaggccctgcgcgcggccatcgccaactttcgcggcgaaagcctggaggaggagcatgaggagggcaagctgatctgcaaatgcttcggcgtcgatgaaggacacattcgccgcgcggtgcagaacaacggcctgaccacccttgaagaggtgatcaactacaccaaagcgggcggcggctgcaccgcctgccacgaaaaaatcgagctggcgctggcggagatcctcgcgcagccgccgcagacgccgcccgctgcggccagcggcaaagatccgcactggcagagcgtcgtcgagaccatcgctgaactgcgcccgcatattcaggccgacggcggcgatatgtcgctgctcagcgtcgccaaccaccaggtgaccgtcagcctctccggcagctgtagcggctgcatgatgaccgatatgaccctggcctggctgcagcaaaaactgatggaacgtaccggctgttatatggaagtggtggcggcctgagccgcggttaactgaccctagggggacaagatgaaacaggtttatctcgataacaacgccaccacccgtctggacccaatggttctggaagcgatgatgccctttttgaccgacttttacggcaacccctcgtcgatacacgattttggcctaccggcccaggcggctctggagcgcgcgcatcaacagaccgcggcgctgctgggcgcggagtatcccagcgagatcatctttacctcctgcgccaccgaagccaccgccaccgccatcgcctcggccatcgccctgctgccggagcggcgcgaaattatcaccagcgcggtcgaacatccggcgacgctggcggcctgcgagcacctggagcgccagggctacctgatccatcgcatcgcggtggatagcgagggggcgctggacatggcgcagttccgcgccgcgctcagcccgcgcgtcgcgctggtcagcgtgatgtgggcgaataacgaaaccggggtgcttttcccgatcgccgaaatggcggagctggcccatgaacaaggggcgctgtttcactgcgatgcggtacaggtggtgggcaaaatgccgattgccgtgggcgagacccgcatcgacatgctctcctgctcggcgcataagtttcacggaccaaaaggcgtaggctgcctctatctgcgccggggaacgcgctttcgcccgctgctgcgcggcggtcatcaggagtacggtcggcgcgccgggacggaaaatatctgcggaatcgtcggcatgggcgcggcctgcgagctggcgaatattcatctgccgggaatggcgcatatcggccagctgcgcgacaggctggagcatcgcctgctggccagcgtgccgtcggtcatggtgatgggcggtagccagccgcgggtgcccggcacggcgaatctggcctttgagtttattgagggtgaggccattctgctgctgctcaaccaggccgggatcgccgcctccagcggcagcgcctgcacgtcaggctcgctggaaccctcccacgtgatgcgggcgatgaatatcccctataccgccgcccacggcaccatccgcttttccctctcgcgctacacccgggagaaagagatcgattacgtcgtcaccgcgctgccgccgattatcgaccggctgcgcgcgctgtcgccctactggcacaacggcaagccgcgcccggcggacgccgtcttcacgccggtttacggctaaggcggaggtggctgatgggacgcgtgctgattaacgataccaccctccgcgacggcgaacagagccccggcgtcgcctttcgcaccagcgaaaaggtcgccattgccgaggcgctttatgccgcagggattacggcgatggaggtcggcaccccggcgatgggggacgaggagatcgcgcggatccagctggtgcgtcgccagctgcccgacgcgacgctgatgacctggtgccggatgaacgcgctggaaatccgccagagcgccgatctgggcgttgactgggtgaatatttcgattccggcttcagataagctgcggcagtacaaactacgcgagccgctaacggtgctgctggagcggctggcgatgtttatccgccttgcgcatacgctcggtctgcgggtatgcatcggctgcgaggacgcctcgcgcgccggcgtccaggccctgcgcgctatcgccgaggtcgcgcagcagtgcggcgccgcccgcctgcgctatgccgatacggtcggcctgctcgaccccctcactaccgcggcgcaaatctcggccctgcgcgaagtctggtccggggaaatcgaaatgcacgcccacaacgacctgggtatggccaccgccaatacgctggcggcggtaagcgccggggccaccagcgtgaatacgacgatcctcggcctcggcgagcgggcgggcaacgcggcgctggaaaccgtcgcgctgggcctggagcgctgcctcggcgtgaagaccggcgtgcattttccggcgctgcccgcgctctgtcagagggtcgccgaagccgcccagcgcgccatcgacccgcagcagccgctggtcggcgagctggtgtttacccatgaatcaggggtccacgtggcggcgctgctgcgcgacagcgagagctatcagtcgatcgccccttccctgatgggccgcagctaccggctggtgctgggtaaacactccgggcgtcaggcggtcaacggcgtatttgaccagatgggctatcaccttaacgccgcgcaaattaaccagctgctgcccgccatccgccgcttcgccgagaactggaagcgcagcccgaaagattatgagctggtggctatctacgacgagctgtgcggtgaatccgccctgcgggcgagggggtaatgatggagtggttttatcaaattcccggcgtggacgaacttcgctccgccgaatcctttttccagtttttcgccgtcccctaccagcccgagctgcttggccgctgctgcctgccggtgctggcaacctttcaccgcaaactgcgcgccgaggtgccgctgcaaaaccggctggaggaaaacgcccgcgctcactggctgctggcgcgacgactgctcgcggagagctatcagcaacagtttcaggagagcggaacatgagaccaaaattcacctttagcgaagaggtccgcgtcgtacgcgcgattcgtaacgacggcaccgtggcgggcttcgcccccggcgcgctgctggtcaggcgcggcagcaccggctttgtgcgcgactggggcgtttttttgcaggatcaaattatctaccagatccactttccggaaaccgatcggatcatcggctgccgcgaacaggagctgatccccatcacccagccgtggctggccggaaacttgcaatacggtgataacgtcgcctgccggatggcgcttgcggtcaacggcgatgtggtcgtgagcgccggccagcggggacgcatcgaggcgaccgatcgcggagagaccggcgacagctacaccgtggactttagcggccgctggttcagggttccggcgcgggccatcacccttatagaggagagagaagaatgaacgcatggcaacgttttgcccggcagcggctggcgcgcagccgctggaatagcgaccccacggccctggagccggccgatacgccggcttttgaacaggcctggcaacgtcagtgccgcatggagcaggcgatcgtcgcgcgggtcccggaaagcgatattccggcggcgctgctggagaatatcgccgcctcccttgccgtctggctcgacgagggggaatttacgccgccggagcgcgcagccatcgtgctgcatcacgcccgactggaggtcggctttaccgatatcgcccgccaggcgccgcagccggatctctccacggtgcaggcctggtacctgcgccaccagacgcagtttatgcgcccggagcagcgtctgacccgccacctgctgctgacggtcgatggcgaccgcgaagccgtacaccagcggatcctcggcctgtatcggcaaatcaacgcctcccgggacgcgtttgctccgctggctcgccgccattcccactgcccaagcgccctggaagagggccgtctgggctggattagccgcgggctgctctatccccagcttgagacggcgctgttttcactggcggaaaacgccctgagcctccccgtcgccagcgagctggggtggcatcttttatggtgtgaagcaattcgtcccgccgcgcccatggagccgcagcaggcgctggagagcgcgcgagattatctttggcagcagagccagcagcgccatcagcgccagtggctggaacaaacgatttcccgtcagccgggcctgtgcgggtagcctcgcggctacccgttaacgcctacagcaccgcgcgtttaatctcctcaagccagctcgccagacgcgcttcggtctggtcgaactggttatcctgatccagcaccagcccaataaagcgttcgccttccagcgccgcagaggcgctgaattcatagccctcatttggccagctgccgattatctgcgcgccgcgcgcgcgcagagcgtcgtacagcggacgcatcccgctaacgaagttgtccgggtagcctttctggtcgccgaggccgaacagcgccacggttttcccgctcaggctggcgtcgtcgaggtcgctaatgaattcgctccatgattcgccttcgcatccggcctcaagccccggcagctggccgtcgccgagcgtcggcgtgcccagcagcagcaccggataggccataaagtcgtccagcgtcgtgcggttaatgttgaccggggcatccgccagctcgcccagctgtttgtggatcattttcgcgattttgcgggttttaccggtatcggtgccaaagaaaataccaatgttcgccatattgcgctcctgtcggaaagggggttgaaaacacgcgttctcgcagaggtattgcgaaggctgtgccaggtttctttgcactatcgcggctcacccctgccccaaaacgatcgcttccgcgcccgcccgccgcccgcagcggggccggcgggccgcttaaaatgaaaaaagcgctgggttttcccctaccggatcaatgtttctgcttatctcgccgataagggcgcacgctttgcatggttatcgaaattcgacaaacgccgcggcgttctcgtcacggtgtcggacaaattgtcataactgcgacacaggagtttgcgatgaccctgaatatgatgctcgataacgccgtacccgaggcgattgccggtgcgctgactcaacaacatccggggctattttttacgatggtcgaacaggcatcggtagccatttccctcaccgatgcccgggcgaatattatctacgccaacccggcgttttgccgccagagcggatattcgctggcgcaactgctcaatcaaaacccgcgcctgctggccagcagccagacgccgcgagaaatctaccagcagatgtggcaaaccctgcttcagcgccagccgtggcgcggccagctgattaatcagcgccgcgacggcggcctgtatctggtggatatcgacatcacgccggtgctgaatccccagggcgagctggagcattatctggcgatgcagcgggatatcagcgtcagctataccctggaacagcggctgcgcaatcatatgacgctgatggaggcggtgctcaacaacatccccgccgccgtggtcgtggtggatgagcaggatcgggtggtgatggataatctcgcctacaaaacgtactgtgcggactgcggtggaaaagagctgctggtcgagctccagatttcaccgcgcaaaatggggcccggcgcggagcaaatcctgccggtggtggttcgcggcgcggtccgctggctgtcggtgacctgctgggcgctgcccggcgtaagcgaagaagccagccgctattttgtcgacagcgccccggcgcgcacgctggtggtgatcgccgactgcacccagcagcgccagcagcaggagcagggccgtctcgaccgtctgaagcagcagatgaccgccggaaagctgctggccgccattcgcgagtcgctggacgcggcgctgattcagcttaattgcccgatcaatatgctggcggcggcccgtcggctgaacggcgaaggcagcggcaacgtggcgctggacgcggcgtggcgcgaaggcgaagaggccatggcgcgactgcagcgctgccgcccttctctcgagctggaaagcagcgccgtctggccgcttcagcccttctttgacgacctgtacgccctctaccgcacccgctttgacgaccgcgcgcggctgcgggttgacatggcatcgccgcatctggtcggcttcggccagcgtacccagatgctggcctgcttaagtttatggctcgatcggacgctggccctcgccgctgaactgccctccgtaccgctggagatcgagctttatgccgaagaggacgagggctggctctcgctgtatctcaacgacaatgtaccgctgctgcaggtgcgctacgcccactcacccgatgccttaaactctcccggcaaagggatggagctgcggctgatccaaacgctggtcgcctaccaccgcggcgcgattgaactggcttcgcgcccgcagggaggcaccagcctcgttctgcgattcccgctctttgataccctgaccggaggtgagcaatgatccataaatccgattcggacaccaccgtcaggcgcttcgatctctcccagcagtttaccgccatgcagcggataagcgtggtgctgagccgcgccaccgaagcgagcaaaaccctgcaggaggtgctgagcgttttacataacgatgcgtttatgcagcacgggatgatttgcctgtacgacagccagcaggagatcctgagcatcgaggcgctgcagcaaacggaaaaccagacgctgcccggcagtacgcaaattcgctaccggccgggagaaggactggtcggtaccgtgctggcgcagggccagtcgctggtgctgccgcgcgtcgccgatgaccagcgctttctcgatcgtctgagcctgtacgactacgacctgccgtttatcgccgttccgctgatgggcccccattcccggcccatcggcgtactggcggcgcagccgatggcgcgtcaggaagagcggctacccgcctgcacgcgctttctcgaaaccgtcgccaatctggtggcccagacgattcgcctgatgattctgccgacctccgccccgcagccgccgcagcagagcccccgagttgagcgcccgcgcgcctgtaccccttcacgcggtttcggcctggagaatatggtcggcaaaagcccggcgatgcggcagattatggacattatccgtcaggtctcccgctgggataccacggtgctggtgcgcggcgagagcggcaccgggaaagagctgatcgccaacgccattcatcataattccccgcgcgccgccgccgcattcgtcaaatttaactgcgcggcactgccggacaatctgctggagagcgagctgttcggccatgagaaaggcgcgtttaccggcgcggtgcgccagcggaaaggccgctttgagctggcggacggcggcaccctattcctggatgaaatcggtgaaagcagcgcctcgtttcaggccaagctgctgcgaattctgcaagaaggagagatggagcgcgtcggcggcgatgaaaccctgcgcgtcaacgtacgcatcatcgcggcgaccaaccgccatctggaagaggaggtgcggctggggcatttccgcgaagacctttactaccgcctgaacgtaatgcctatcgcgctgccgccgctgcgcgagcgccaggaggatatcgccgaactggcgcattttctggtacgtaaaatcgcccacagccaggggcgaacgctgcgcatcagcgatggggcaattcgcctgctgatggagtacagctggccgggaaacgtccgcgaactggaaaactgtctcgaacgttcggcggtgatgtcggaaagcggcctgatcgaccgggacgtgattctgttcaaccatcgcgataacccgccgaaagcgctacccaacggcggccagactgaagacggctggctcgacaacagcctcgacgagcgccagcggctgattgccgccctggagaaggcgggctgggtgcaggccaaagcggcgcggctgctcgggatgacgccgcgtcaggtagcgtatcgcattcagatcatggatatcaccatgccgcggctgtgaagcgttatgtgagattcaggacattgtcgccagcgcggcggaattgcgacaattttacctggccggccgtcagttaaagcgtttatttttcatatggttgtaaaaatcccctctggtatagcatttgcagcaggaaggtatcgcccaaccacgaaggtatgaccatgacttcctgctcctctttttctggcggcccagcctgccgcccggcggatgacagcgccctgacgccgcttgtggccgataaagctgccgcgcacccctgctactctcgtaatgggcatcaccgttttgcgcgaatgcatctgcccgtcgcgcccgcctgcaatttgcagtgcaattactgtaatcgcaaattcgattgcagcaatgagtcccgccccggcgtatcgtcaacgctgctcacgcctgaacaggcggtcgtcaaagtgcgtcaggtcgcacaggcgatcccgcagctttcggtggtcggcatcgccggccccggcgatccgctcgccaatattgcccgcaccttccgtaccctggagctgatccgcgaacagctgccggacctgaagttatgcctgtcgaccaacgggctgatgctgcctgacgccgtggatcgcctgctggacgtcggggttgaccacgtcacggtcaccattaataccctcgacgcggagattgccgcgcaaatctacgcctggctatggctggacggcgagcgctacagcggacgcgaagcgggagagattctgattgctcgtcagctggagggcgtgcgcaggctgaccgcccagggcgtgctggtgaaaataaattcggtgctgatccccggcatcaacgatagcggcatggccgacgtgagccgcgcgctgcgggccagcggcgcgtttatccataatattatgccgctgatcgccaggccggagcacggcacggtgtttggcctcaacggccagccggagccggacgcagagacgctcgccgccacccgcagccggtgcggagaagtgatgccgcagatgacccactgccaccagtgccgcgccgacgccatcgggatgcttggcgaagaccgcagccagcagtttacccagcttccggccccggagagcctcccggcctggctgccaatcctccaccagcgcgcgcagctgcacgccagcattgccacccgcggcgaatctgaagccgatgacgcctgcctggtcgccgtggcgtcaagccgcggggacgtgattgattgccactttggccacaccgaccggttctctatctacagtctctcggccgccggcatggtgctggtcaacgaacggtttacgcctaaatattgtcaggggcgcgaagagtgcgagccgcaggataacgcggcccggttcgcggcgatcctcgaactgctggcggacgttaaagccgtattctgcgtgcgtatcggccatacgccgtggcaaatgctggaacaggaaggcattgaaccgtgcgttgacggcgcgtggcggccggtctccgaagtgctgcccgcgtggtggcagcagcgccgggggagctggcctgccgcgctaccgcataagggggtcgcctgatgccgccgctcgactggctgcggcgcttatggctactgtaccacgcggggaaaggcagctttccgctgcgcatggggcttagcccgcgcgactggcaggcgctgcggcgacgcctgggcgaggcggagacgccgctggacggcgaggcgctaacccgccgccgcctgatgagcgaactcaacgctacccgcgaagaggagcgccagcagctgggcgcgtggctggcgggctggatgcagcaggaggccgggccgatggcgcagattatcgccgaggtttcgctggcgtttaaccatctctggcaggatctgggccttgcgtcgcgcgccgaactgcgcctgctgatgatcgactgctttccgcagctggtggcgatgaacgaacacaatatgcgctggaaaaagttcttttaccgtcagcgctgtttgctccagcagggggaagttatctgccggtcgccaagctgcgacgagtgccgggagcgcagcgcctgctttgagtagcggttacccgagctcctgcccggcctgcggaacgccagaaacaaaaaagccggaggtctccctccggcttttcacatcaccaaacgcgatcaggcaacgtcttcgtactgcggtaccgggttgcggaagcttttggtcacgcaggccaggtagaccagaccaataccgccccagatcaggccgagaaccatggagctctcttccagattgatccacagtgcgccaacggtcagcgcgccgcacaccggcagaaccagatagttgaagtggtctttcagcgttttgttgcgcttttcacggatccagaactgggagatcaccgacaggttaacgaaggtgaacgccaccagcgcgccgaagttaatcagcgccgtcgccgtgacgaggtcgaatttaatcgccagcagcgcaatcgcgccaaccagcagtacgttccacgccggagtccgccatttcggatgcacgtagccgaagaagcgcgtcgggaacacgccgtcgcggcccatcacgtacatcagacgggaaacgcccgcgtgcgcggccatgccggacgccagtacggtgacgctggagaaaatcagcacgccccactggaaggttttgcccgccacgtacagcatgatttcaggctgcgatgcgtccggatccttaaagcgcgagatatccgggaagtacagctgcaggaagtaggaagcgccgataaagatcaggccgccaatcagcgcggtcaggaagatagccttcgggatcacgcgctctgcgtctttggtctcttcagacagcgaagagataccgtcgaagccgaggaacgagaagcacaggatggtcgcgccggtaatcatcggcaccacgtgcgcgccttcagaccagaacggacgggtgctggtcagcgtgcccgcgccttcgccgtgcataacgccgtagataatcaggccaacaatcaccgccacgatgcccatctgcaggataacgattagggtgttgaagttcgccacggtcttgatgctgcgcaggttggagatggtcataaaggccaccagcgcgacaacgaagatccacgatggaatagaaggcaccagcgcttcaaagtaaattttcgccagcagaatgttgatcatcggcatgaacaggtagtccagcagcgatgaccagccaaccataaagccaacggccgggctaatggatttctgcgcgtaggtataagcggaacccgccgaagggaaacggcgaaccagtttaccgtagctcagcgccgtgaaaagaatggcgatcagcgcgaaggcgtaagccgtcgcaacgtgaccatcagtcaatccagagacgataccaaacgtatcgaacagcgtcatcggctgcatataggccaggcccatcatgacaaccggaatcaacgtaagcgttttacgtaattccacgcgagaggtttttggagtagcgttatgcgacatagttatccccttttacggtgaacgccagcgcgtaagcaaaaaattgccccatttctttgtattcctcagcgacaaccactgtcggtttttagtaaatatctatccggtacgaagcccggcctcttggtattgaatgatgtgtctttcaaccaaaaaaataaccgacactttaaaaaagcgtcggccagtttctgattttcaggacgcgtattttgcaacaactactggcacgatgacaagatgttacaaggcttaataattacggcgattctctaacagattaatattcatacgattttagtattatagacctgatggatagcactatttgctaatatctcctttcgccaccactcgcccgcctggccgcaaatatcttcattccagcctatccacgcgcgattgaccggttcaggcaccgtcgtttttaatatttgtagctcgccgcgggcgatgaaaggctgtacctgaaatagcggcaaatagccccatcccagtccggcgcacagcagcgtcagccgggcggaaagatcgaataccgccaggctatcctgagcgtcaatctgcggccacgcgccgtcggctacaatcgcccgatgacggcgcaacgtccgccagcccagcgggccggcaatctgcgcaagcggatgccggggcgcaacaacaaacgcctgcgccacctctcccagcagaacagagccgcagccgctgagcgccggcgggtcgcccagcacgccgagcagaagatccgcccgcccttccatcagcatctgccagtttgcgccaggggtatcgcggcggaattcaaggcgggtggcgtgatgctggtgataaaacgccgcgatcgcgggagccagcagcgggaacggaaaggtggcgtcgacgttgagtatcagcgcattttcccagccctgctgcagcctgacggcctgcttttccagttctcgggcggtgtgcagcacgtcgcgccccttttccagcagcatctgcccggtacgggtaaagcgcgcccggtggccgctgcggtcaagcagttgaatattgagatcgctttccagcttatgaatggtgtagctcagcgccgacggcgttttatagagcttcgccgaggcggcggcaaaactgccctctttgtcgagggcatcaagaatgacgagcacatccagcagtggtttcatcgctacccccttacggtacgcgattcaccgctggcgcattactccatcggcatgaccagcgggtcggggtactggtactcaaaccccagttcgttgcaaatacggctgccatctacgatcttaccgctaccgttctccgggttatcagagaatacggggacgggaagcccaagctcgcgggccatctgcggataaaagacgccgcgcgcgggatgcttaggcgcacatatattatagatgcgcccgcctttcggagcctgcagtaacagttcgatcgcggcaatcacatcctgaagatgcaccagattgacgccgtgctggccgtccggcgcggattttccggcaaaaaagcgccccggatgacgggacggccccaccagcccggcgaggcgcagaatgtccaccgaggtgccgggaagattatgcagccagtcctccagctctttcagcacccgcccgctggcggtttgcgggttgcggggcgagttctctttcagcgtgccgctggcgttgccgtaaaccgacgttgagctggtgaatatgatgcgcggcacgtgatgcgccagcgcggtatcgacgatctcctgtaccgcctgaagataaaagtcctctcccggtccggttcgccgcgccggtaaggtaatgaccagcgcgtcaacgttcattaaggcatccagatcttcggcgtcgcagaccagctgcggctccagacgcagcggatagccgtcgatgccgcacatccgcgccgcctcgacgccatcctgcgtggtcttactgccggtcacctgccatccccgcgacatcaacgacagcgcaagcggcatacccagccatcctaaacctacaattgcgacctttttcatccccttgctcctgaattttcgctgtgctgacttaaggctacgccagccggcggcagctgacaatttctaaggtcaatatgaaatcaattaatgatagaaaaaagtccttgctttatgcgagtgaagtggtttaggttaaaaggcatcaaatgcatagtcattcacagagaattttatgaacagcgttcaatttaaaaaccaccatcatcaccatcatcctgactagtctttcaggcgatgtgtgctggaagacgtttggatcttccagtggtgcatgaacgcaaagagagcccccggaagattcacttccgggggcttttttttggaccgaattcggacagattcagacagggttacagaggaaaataagaatgttagacaacagccgtttacgcatagctattcagaaatcagggcgtttaagcgaagattcacgcgaattactcagccgctgcggcatcaaagtgaatctgcacacccagcgcctgatcgcgctggcggaaaatatgcccatcgatattctgcgcgtgcgtgatgacgatattccgggccttatcatggacggcgtggtcgatttggggattatcggcgaaaacgtgctggaggaagagctgctgagccgccgcgctcagggcgaagacccgcgctacttcaccctgcgccgtctcgacttcggcggctgccgcctgtcgctggcgaccccggcggatgaaccctgggacggcccggcagcgctggacggcaaacgcatcgccacctcctacccgcacctgctgaagcgctaccttgaccagaaagggatctcgttcaaatcctgcctgctgaacggctcggttgaagtggccccgcgcgccggtctggccgacgcgatttgcgacctggtatcaaccggcgcgactctcgaagcaaacggcctgcgcgaagtggaagtgatgttccgctccaaagcctgcctgatccagcgcgacggcgagatggccgatagcaaacagcagctgatcgaccgcctgctgacccgtattcagggagtgattcaggcccgcgaatcaaaatacatcatgatgcacgcgccgaccgagcgcctggaagaagtggtcgccctgctgcccggcgccgagcgcccgaccattctgccgctggcgggtgacaagcagcgcgtggcgatgcacatggtgagcagcgaaaccctgttctgggaaaccatggaaaaactgaaagcgctgggcgccagctccattctggtcctgccgattgagaagatgatggagtaaaccggcgggtcggtcacgggataaacaggggaaacaaccatgagcttcaacacaattatctactggaacggctgtagcgcagaacaacagcaacagctcttaacgcgcccggccatttccgcctccgagagcatcagcaagacggtgtcggagatcctgaataacgttaaagacaacggcgatgcggccctgcgcgaatacggcgcgaagttcgataaaaccgacgtcaaggcgctgaaggtcagcgatgaagagattgccgccgccggcgcgcgcctgagcgacgagctcaagcaggcgatggccgtggcggtcaaaaatatcgaaaccttccacaacgcgcagcggctgcaggccgtcgatgtggaaaccctgccgggcgtacgctgccagcaggtgacccgccctatcgcctccgtcggcttatatattcccggcggctcggcgccgctgttctccacggtgctgatgctcgccacgccggcgcgcatcgcgggctgccagcaggtggtgctgtgttcgccgccgccgattgccgatgaaatcctctatgccgcccagctgtgcggcgtgcgcaatatctttaacgtcggcggcgcgcaggcgattgccgccctggcgttcggcaccgaatcggtagcgaaggtcgataaaatctttggcccgggcaacgccttcgtgaccgaagccaagcgccaggtcagccagcgtcttgacggcgcggctatcgatatgcccgccgggccgtcggaagtgctggtgatcgccgacagcggtgccaccccggatttcgtcgcctctgacctgctttcccaggcggagcacggcccggattcgcaggtgatcctgctgacgccggatagcgagatggccacccgcgtcgcgcaagccgttgagcgccagctggccgcgctatcccgtgcggaaacggcccgcggggcgctctccgccagccgcatcatcgtggcgcgcgatatcgcccagtgcgtggagatttccaaccagtacggtcccgagcacctgattattcagacccgcaacgcccgcgaactggtcgacggcattaccagcgccggttcggtatttctcggcgactggtcgccggaatccgccggcgattacgcctccggcaccaaccacgtgctgccgacctacggctacaccgccacctgctccagcctcggcctggcggattttcagaaacgtatgaccgtgcaggagctgtcgcgcgacgggtttgccgccctcgcctcaacgattgagattctggccgccgccgagcgtctggacgcccacaaaaacgccgttacgctgcgcgtcgcagcccttaaggagcaagcatgagcatcgaagatttagcccgcgccaacgtccgcgcgctgacgccgtatcaatctgctcgccgtctgggcggtaaaggcgacgtctggctgaacgccaacgaattcccgaccgcggtcgcgtttcagctgaccgagcagacgatgaaccgctatccggaaccgcagccgaaagcggtcattgaacgctacgcgcagtatgcgggcgtcaagccggagcaggtgctggtcagccgcggcgccgatgaaggcattgaactgctgatccgcgccttctgcgagccgggccaggacgcggtgctctactgtccgccgacctacggcatgtacagcgtcagcgccgaaaccatcggcgtgacctgccgtacggtgcccaccctcgccgactggcagctggatctgccgggtatcgcggccaatcttgacggcgtgaaagtggtgttcgtctgcagcccgaataacccgaccgggcagattatcaacccgaaagattttcgcaccctgctggagatggcgcgcggtaaagccatcgtggtcgcggatgaggcctatattgagttctgcccgcaggccacgctggcgacctggctcaacgagtatccgcacctggtgattctgcgtaccctctccaaggccttcgccctggccggactgcgctgcggctttaccctcgccaacgccgaggtgattaacgtgttgatgaaggttatcgcaccttatccgctctcgacgccggtcgccgacatcgccgcccaggcgctcagcgcggaaggcattgccgccatgcgggcgcgcgtggcgcagatcctcggcgaacgcgattatctggtcagccagctgcgcagcattgcctgtgttgaagaggtgttcgattccgagagcaactacgttctggcgcggatcaccgcctccagcgcggtatttaaatctttgtgggatcagggcattatcttacgtgaccagaataaacaaccttcattaagcggctgtttgcgtatcactatcggtacccgtgcagagagccagcgcgtcattgacgctttgactgcggagaatgtatgacccagaagtttctctttattgaccgtgacggtacgctgatttccgagccaccggttgattttcaggtagaccgcttcgataagctggcgtttgagccgcaggtgatcccggccctgctgaagctgcagcaggaagggtacaagctggtgatgatcaccaatcaggacgggctgggaaccgccagcctgccgcaggacgagttcgacggcccgcacaacctgatgatgcagatcttctcctcacagggcgtcaactttgacgaggtgctgatttgcccgcatctcccggcggataactgcgactgccgcaagccgaaaaccaaactggtgctaccgtggctggagcaaggggtgatggacaccgccaacagctacgtgattggcgaccgcgcgaccgatatccagctggcggataacatgggcattaccggcctgcgctatgaccgcgaaaagctggactggccaaccatttgtgaacagctaacccgccgcgaccgctacgcccacgttgagcgcatcaccaaagagacccaggtggatgtgaaagtgtggctggaccgcgaaggcggcagcaaaatctccaccggcgtcggcttcttcgatcatatgcttgaccaaatcgccacccacggcggcttccgcctggagattaacgtcggcggcgatctttatatcgacgatcaccacaccgtggaagatactgggcttgcgctgggcgaagcgctgaagctggccctcggcgacaaacgcggtatcggccgtttcggctttgtgctgccgatggacgaatgcctggcccgctgcgcgctggatatctccggccgtccgcacctcgaatacaaagccgactttacctatcagcgcgttggcgatctgagcaccgagatggtggaacacttcttccgctcgctctcctataccatggcgatcactctgcacctgaaaaccaagggcaaaaacgaccaccaccgcgtagagagcctgtttaaggccttcggccgcacgctacgccaggcgattcgcgtccagggcgacacgctgccgtcttcgaaaggggtactctgatgaacgtggtgatcctcgataccggctgcgccaacctcaattcggtgaaatccgcggtgagccgccacggctacgagccacaggtcagccgcgacccggatgtggtgctacgcgccgataaactgtttctgccgggagtgggcacggctcaggcggcgatggaccagctgcgcgagcgcgatttgatcgaactgattaaagcctgtacccagccggtgctgggcatttgcctcggtatgcagctgctgggaaaacgcagcgaggagaataacggcgttgacctgctgggcattatcgaccaggacgtgccgaaaatgaccgaccacggcctgccgctgccgcatatgggctggaaccgggtatacgccaaagcgggcgatcgtctgtttcgcggcattgaagacggggcatatttttacttcgtccacagctacgcgatgccggtcaacgtcaataccatcgcccagtgcagctacggcgaggccttcaccgcggcggtgcagaaagataacttctttggcgtccagttccaccctgaacgctccggcagcgccggggcgcagctgctgaaaaacttcctggagatgtgatgatcattcctgctttagatttaattgacggcacggtcgtccgcctccatcagggcgattacggtcagcagcgcgactacggtaacgacccgctgccgcgcctgcaatcctatgccgcccagggggccgaagtgctgcacctggtcgacctgaccggggcgaaagatccggcgaagcgccagatcccgctgctgaaaaccctggttgccggcgtgaacgtgccggtgcaggttggcggcggcgtgcggacggaagaagacgtggccgccctgcttgatgcaggcgtggcgcgcgtggtggtgggttcaacggcggtgaagtcgccggaagtggtgaaaggctggtttacgcgttttggcccgcagcatctggtgctggcgcttgacgtgcggatcgacgcggaaggcaacaagcaggtggcggtcagcggctggcaggagaactccggcgtaaccctggaggagctggtggagagctatcagtccgtcggcctgcagcacgtgctgtgcaccgatatttcccgcgacgggacgctggccgggtctaacgtctcgctgtatgaagaagtctgcgcccgctatccgcaggtcgcgtttcagtcttccggcggcattggcgatctgcatgatatcgccgcgctgcgcggaaccggagtgcgcggggtgattgtcggccgggcgctgctggaaggtaaatttaacgtaacggaggccattcaatgctggcaaaacggataatcccctgtctcgacgttcgcgacggccaggtagtgaaaggcgtgcagttccgtaatcacgaaatcatcggtgatatcgtcccgctggcaaaacgctatgccgacgaaggcgcggatgagctggtgttctacgatatcaccgcctccagcgacggccgcgtggtggacaaaagctgggtgtcgcgggtcgcggaagtgatcgacattccgttctgcgtcgccggcggcattaagtcgctggacgatgcggcgcaaattctctccttcggcgcggataaaatctccatcaactcccctgccctggcggatccgacgctgattacccgccttgccgaccgtttcggcgtgcagtgtattgtggtgggcatcgatacctggtttgacgccgcgagcggtaagtatcacgtcaaccagtataccggcgatgagagccggacgcgggtgacgcagtgggaaaccctggactgggtgcaggaagtgcaaaagcgcggggccggcgagatcgtcctcaatatgatgaaccaggacggcgtgcgtaacggctacgatctggcgcagttaagcaaggtccgcgccgtgtgccacgtgccgctgattgcttccggcggcgcgggcaccatggagcacttcctggaagccttccgcgacgccaacgtcgacggcgcgctggccgcctcggtgttccacaagcaaattatcaacattggtgaactgaaaacgtacctggcagcacagggcgtggagattagggtatgttaagtgaacagctggattggcaaaaaaccgacggtctgatgccggtcatcgtgcagcacgccgtttctggtgaagtgctgatgctgggctatatgaatcaggatgcgctggcgaaaaccgaagagaccggcaaggtgaccttttattcgcggaccaaacagcgtctgtggaccaagggggaaacgtcgggcaatttcctcaacgtggtgagcatcaccccggattgcgataacgataccctgctggcgctggttaatccgattggcccaacctgccataaaggcacctcaagctgctttggcgaaaccggccatcagtggctgttcttatatcagctggagcagctgctggcggaacgcaaacacgccgatccggaaagctcctataccgcgaagctgtacgccagcggcaccaaacgtattgcgcagaaggtgggggaagaaggcgttgagaccgcgctggccgcgacggtgcatgaccagttcgaactgaagaatgaagcgtcggatttgatgtatcacctgctggtgctgctgcaggatcaggggctgaatttaacggatgtggtggaaaacctgcggagcaggcataagtaaatcatcaaagggaggcggcatgacgcctcccttgcaatatcaacattgccagcgcgctggttgatatcacctgtttatcatcgtcatgacttttttcgtgcggttatttctttaactagtctcaatggtttcgtcattttccatgataaagatgaaaccaaatctgtatagcgctgagtcagctcctggtacgcattttcaatgctgagcaatttctgttgctgagtttgatactcgtcctctaaatgcgcattccgctgttcaagctcgtggataatggtggttttatcgccaacctgcgccttcagaacatcaatttcacttcgctgagataccgccgactgtttaagagaagtcatttcttcctgcagcgttgagttcatcatttgtgcatgttcaagctcgcgtaacgctctgtctttcagcgaaaaaatatactcttccgctgactgattaacgatccgggcatacgcagctttgataaagtcatcataaaaatcatcacgatcgatttctaaagataagatgaacgactttacttcattaaacaacgggttaaacgtaccgccagaaatcgtattgagatgccactcaagaaaaacaacggcgtaattattaaaatcacgacttctggacgccagtaaatcacgatcttgcataaacaaacgtagcgaagttaatgcctccagcgcgcagtgccacgaatcttctctggtggaggaaagcgactcagcgcggtggatagtatgagagattaagatctcatcaaccagagagatgcgatttgctaacagcatgaaacaactcacaaagtacaggtcgtttgtggttctcagcggttgaaactccaggcccattgccaggatagcctcgcgtctgaagagcttatcccatggccaccatataaaggctctgaaaaaatcgtcagcaatttcccgtgaagagaagacctctttttcaggcagtaaatcctcacgcgccgacaaaggcatgggagaacgggtattggtttgcaaatcgactgactggcaccggcagataacaacatccgtttgcagggccgtagcccggtcggacattctctttaacatctctttatcggcgtaatcgtcatcgtcgaggaaaatgatgtattcgccggtcgctactcgtaagccgatatttcgcgattcgccgccaccgacgttgctcggattggtgataacccggactcgcgaatcttcactggctattttagtgacaatatccagagtattatccgttgagctatcgttaacaaggataatctcaatctcttttaaagactgggctaacaccgtagtaagcgtctcagcaatatactccgcggcgttatggacagggataataacggatacaataacgttacttgattcatcagacattcaatcaccttcaaaataagaggcacgcaatcattaaactcatcatgcgtttgctgagcagttacatagcttaaaatgcaaccgcttcggaggtgtttgatttacatgaagctgtaatctcttgcgttacatcatccctgaaccacatcatgataagtctttaaggtcttgctaatgatcataccgctagaaaacttatcctgaacgcgttgccgtcctttgatacccatctctactcgtgctttgggattggctaacaagaattcaagcttatcggccagctcctgcggagagttacttttcacgataatgccgttatcgttattaacgatcaggctatcgcagccgccaacatcgtaggcaatgcaggcccggccaaccgaggaagcctcaagcagaatacgcggcacgccttcggaatagatcgaaggtaatgccacaatgttcgactcctcgatcaagtcgcagacgttagagctgtgccccaaccagttaatcagaccttctttatgccattgctggatcaccgcaagggatatagcatccttatcgttttcaacgagtatcccggcaacgtttagcgtaaaatgaatatttcttgcttcgaggattttcttggcttcaattaaatccccgagccctttactccagagcattctgctggcaaacagcacaaccggaacgtcacgctcctgctccagagaatatttatagatctccggattgatacccgcgccatcgatgacaatagtctgctgatagtcaatcccgacaaaacccgccagttttttacgatctttatcgtgctcaaacataaatatactgcgcttattactggcaatatatttgtaggccatgatggtgatattgcgcaatagcttaagcaaccccgtatcacctgaaaatacacgacccagaccgacaaaactcacgatgacgggacggttgtttgtcctggacaggagcccaccgatcagacagggtttaatagtaatacagtgtaaaaggtcgggattaatttctttaatgagctttcgggaggcaaaaaaggcccgaaagaaagttaatgcattaaatgattgagcatcaagtgggacattatgacacttaaaaccgaatgttttaaatttattcagcactttaccgtcgacaaaatgactgatgatgtgaatctcataaccagcatctcgggcggcgatcgcacgatcaatccagtgcaaatcaaaataccaatccgagtttatgaaataacacagttttttcattgctatatccacttaatgattcttaccgctgattccttttacaccatggataattccacgacgcaagtatttaaaatataacaatttattgcgttgccatggcaatattgatacatatttaatcaaccgtaaaagaattgagagacggctaaaaatggcaactcgcggaaaaattctcttcgccaaaataagatttcgacaaagataataaaccttccattcgggaacaatacatttcccctggatactcacatcgtgggtaaagatgacctcgggagaatagcgaatagcttcgccatctaatgtcagctgatagccaaaatagagatcgtcaaaatataaaaataactcgtcgtgaatactgtggagatgcttttgcagcacatctcgctgaataatcataccgacaaaggaaaccgtctgtaccgcacacgcccgggaaaccgacggaagaaactccgcaggatttctgatgtagcgtaatgtgtccataaacgatgacggaactttggcaaaaggcatgttcatcggacagggttgcccctgaagatccttgaccaaagcggtgaacacccgacagttagccttttctagctgggaaaatttttccagcgcatcgctctcgggccaggcgtcatcatcgtaaaagaaaacccagtcgctatcgacgttgtcgcataaatattgactcccggccttaaagccacccgcgccaccgctgttggatggcagattaagaacaatcactcgcgggtcgctaagggtggctaaccaggcctgggttccatccgtggacccgttattgacaacaacgatcgctgtaaaatttaatttcaccgtgttggcaatagtcagctttaacttctctaaacgattatacgtgactattaatgcggagcaattcatcgcacagaaaccgtaaatactggcatagactcattactgctaagggaggacaagtacttatcggctgtatttaatgcttctgcgatagtgacatccatatccagatatcgataggttccaaggcggccaacaaacgtcatattcttttcattttccgcgagggacaaatatttatcgagtaaagccatctctcccatctgacgaatcggataataagggatatccttttcaccacattcgcggctgtattccttgtaacagaccgatccctcatgggattcccagggcgaaaagtacttatgttcagtgatacgggtataaggaacatccagcgagcagtaattcattaccgcgcagccctgataatcgccctgccaggtgaatttttcaaaatccagagtacgatagcccagtcgaccatattgataggaataaaaagcatccagcggcccgctatagaacacgtgatcgtactgttctctctcttcagcgttaaacgattgctgaagttcgatggtaatattttcatgattggcgattgactcaatcattttcgtataacccagtttcggcatgccctgaaatctgtggttaaagtaattatcatcgtagttaaaacgaaccggcagacgcttaagaattgacgcaggaagctgcgaaggctccatcccccactgtttgatggtatagcccttgaagaacgcctcatagagctctttgccgataaaacgcagagcctgttcttcaaaggtcttcggttccaggatcgaactgtcccctttttcggcaataagcgcccgggcctcatctggcgaacaggtcttcgcaaaaaactggttgatggtatgcaggttgatcggcagagagaacacctggccattcacggttgctttgacacggttcacatacggcatcatctcagcgtgctgagtcacataattccacactgtttcattatcggtgtgaaagatatgcgggccataaacgtgaaccataacgtcggtttgcggatcgcgcgcatcataggagttaccgcctatgtggtcacgctggtcaataattctgatgtgatgaccttgttcagcgagttggcgtgcgataaccacaccggaaaaacccgctccgacgatgagaatatttttactgttcataatataactccagcagccttaaccaagaattgagcgtctaactttatagtagtattttgttatcgtgtttcgcctcggtgaaccaacaggagcatatttattgaggaaaggcatcaacgcttttttgatcttagtctgaagcagaactggcgtttgcactgcagtttgcgcaggacttgatgaatttaccggagataactgacggaaataggtctctttttcccatggcgtattgatgacgttttccaggaaatcgtcataaaagtcaaccttgtccgtattccacggtttattctccccggcatagtgaatcatattcgggttctttctggcttttaaaaagcgcatatatgttgcgaactggagattggggaaaaagtcatccgtattgccattaccgtgatagacattccactccagcggtaaaaactcaacccggccatagaagactttgttcatgatgtcctggtcgaggaaccagtacttcttctctttgagcgttttaatcagcgcggagaaggtatcttcctgcaccatctgggcaacgttaaaaacgataattcccgcctggaaatactcatccggattggtcattttaagcgttttttgcagatactcgccggcgggcatcacgccatctgccgactccgacatcgcaccaaacttgacgaagccttccatcacgatatctttaacggcggcaacaaggtttgtgccgaggtcgacattaagcaaagtcgcaagatcggccttcaccacagtatcggaatcgataaaaatgaccttctcatattcacggaaaagctgcggaataaacaagcgagcgtaggttgatgcgctaaagtgtgcgcgggtatgtacgccattcaattcagtaaaggcattcacatcaaagaaacgcagtgaaaagttttgctgtcccgagaccagttttagtaagcgctgtttgttaaggttactcaccttattttccagcacaacaatatcgtaatgggtgtttttatcagaatggcgaacaatggagttgattaaggctccaccgctgatggcatagttgtcatcaaaactgatgactatcggcgcagcgtgaggaaaaaccggttccagcttgccgttgaatgtctcattcgtcacgaaagtgcgctgaagttctttaactttcagggcccggtcttgctgctgcttaataatataaatgttaaaaagacgctcagcaatatgtccaataacacgcttttcttgcgcgttataattattcatagagatgcggctttcaagattagtcaaaatcgcgaagagccattctgaataatctacgaacatatctttgtgcatcacaaacatgttcgtataatagccatctgtggcattgttaaactgctgaatagccgctttataatccggataaagctcttcgacaacctccagggcagccagatagtcctttatatgtaaaaactcacctttctcataatgatcgaggttatttttactgccggcagaggtcacagaccacttctttggtaacagcaggtcaaaccctgaaatacaatcctggattgccgtgtcggttaaaccaaactgcttttcatactctgcatcaataacgggtgaattaacgacgccccaattatcttcgggaaagctctgctctgaggaaaagttcagatgtcggcgataatgcataaagccgacataatcagaaagagattcatttttccaaacccaataatgtgctgttaactcacagtaaaaggggtttttaaaagaaatattatcaccggtatcatcgccaatacagccgatatcattataggagttggctttacccacatgtaatggtttgataatcgatgcattaaggaatgcactcggcttatgatgacaggtatagatcttaatactattcatttaattaccagatttaggccattgcttgtttataaagttcgatgattctttcagcggaaccgatttcccgcatacggtgattttcgatccagacaacccgatcgcatatcttttccacatcactcatgttgtggctaacaaacaatattgtcacgccacgatttttgaactctttaatcgtcttgatacatttggcctgaaaagaaatatcgccaacggcaagcacttcatcgataatcaaaatatcaggctcaacttgactgataacagaaaaaccaagcttcgctagcataccgctagaatagacgcggatcggctcatcgataaattcccctaattcggaaaattcaatgatgcgctccattcgctgctgcacctctttacggcgtaacccaagaagtgtggcattaagaaaaatgttctcgcgccccgtcaattctggatgaaagccgccgcccagctcaagcattgaagcgactcgcccacgggtggtgaccgatccttttgtgggttttatcacgccggcaaccagccccaaagatgtgcttttgcctgcgccatttcgcccgatgagcgcaacggcctctcctttaccgaccgtaaaagaaacatcctgaatagcaagatatttgcggcccttcagtaattgaaatgctcttttgggatgaaatattaaatctttaatacctgagccaatatgatggtaaagtggatactcttttgtcacattattaaaatcaattactggttccatcacaagatctctgcaaagcgatattttaatttattaaaaatactcagaccgataaccgtcagcactatacccgtcaaatataatactgaaatatgctcatagtttaaaaccccatccataaataagttgcgccagcttaaaatcatactcgccagagggttatagtcaataacccagctatattttgctggaatcatatcggatgcgtataaaattggcgtacagtagaacattaacataataccgagagtcacaaatctttccagatctctaaaaaatagattcaacgttgaaaagattatagatatgccaaaggtgaatatcacctgcccgatagcaatgagcggtattccccacagccacgaaagcgaaggacgcataccgtatacaaaaagaaaagcgacgatgacaggaatggtacacaagaagtgtaacccttccatcatgacattactgagcgggataactgagcgcggaaatacagtttttttaataatttgcgcattagcaataaatgaaaaaagtgaatttgttgctgagcttgcaaaccactgccagggaaacagccccgttattagaaaaagggtataattaggtatctgaacacgcatgatcagtttgaaaataaaatagtagatcatcgcaaaaagcaaaggattggcaattgaccataaataaccaaacacgctacttttataccgtacctttagatctttattagtgataacaacaagcaggtcaaataaataccctagattatacttcatttttatactcataaattattctacgaaattttaagcattttgttatgcactttagatttcgcgctgtagctgactaaacccccgtcagctgcgatagctctaacgcccgaacttatagattgccgctagataccgtgacttgagcatacgagctgaaaacctaagcacatagattaaagcaagattttcccgagttttgtctccgctttaatgcattggcagcagccgaccattgtagatcttgcataccgaactgggacaagtgagatgctgacctggagatgaccagttaatgtgctgtttcatggcaaacagtaaaaactgctatttttcagtcagataccccctccccttaatgttatgagatagctttaaatcacgctaccgcccttggctgtcgcaaccaaactgcgtaatgattcatctatcttgtctgtcaaaacctccagcgcctgttatcacaaccacagcgcactggctcaacgccgtcctgacgttaaacagcggctgtcgaaaaagtggccgcccgtgacaccgggtgttgctcgcttgaaaacgataaagattcaagcaggggcacactctcgctgtttgctttcgcctcatccatcaggaatttctcaattcgctcatccgacaagcctgttttccatgcgtcagagggctctgtctccgttatctacccattcatcttctgatgaatcagcgcaaactgtgctccaatattgattgaaatgacgccaacaatcagtttagtgtcatatttaatgctgcgcacaggatagctgattaagctgacaacacaatggtcatgcaaatgagcagcagcattatagcgctggtctataggaataaaaatgaaaatacgttgccaatcaattcatattgcaaatgattcagcaggtaaacataatttaaacaaaatttagaaaagaaaacaactctttgatttaaaaagaaaaatcttaaaaacccgccttcaatgtgaaataattgtaaactcaaacataaaatcaattttaatctgcgttatttctccggggcataaaccatccgggcagaacagggaatcctgagtacgcgatcaaaccatacgcaatcattaccttgctaatcataaagcacagataatgaatttcattcaaactacagaacgccagtacaaacccattgatatccggacgccagcgcttccccaacgaacacatgaacataatcagcaacggtaaagcaggtgatccacacggcaagccagtgtaaaatcaatgaatatatagcgggacacagtcaccccagaggatgaatatgaaatttttagtaactggagccgcaggattcatcggctttcatacctgcaagcgccttctggaggcgggtcatgaggttgtcggcctcgacaacatgaacgactattatgacgtcaatcttaagcaggcccgtctggatttactgcaatctcccctgttcagttttcacaaaatcgatctcgcggatcgtgaaggtattgcccggctttttgctaacgagaaatttaaccgagtgatccatctcgccgcgcaggcaggagttcgctactccctggaaaacccgttcgcttatgctgacgctaacctgattggttatctgaacattcttgaaggctgcagacacaacaacgttgagcatttgctctatgcctcatccagttcggtctatggtctgaaccgtaaaatgccgttctctacggaggattcggttgatcatccggtttcgctgtatgccgccaccaagaaagcgaatgaactgatggcgcacacctactcgcatctttatggcattccaaccaccggactgagattcttcaccgtctacggcccgtggggccgtccggatatggcgctgttcaaatttacgaaagccatgcttgagggtaagagtattgatgtctacaactacggcaagatgaagcgcgacttcacctacattgacgatatcgttgaggcggttgtaaggatgctggacattatcccgcagcctaatccggaatggaccgttgaaacgggttcaccagcggatagctcagcgccgtaccgggtgtataacatcgggaatagctcaccggttgagctcatggattacatcactgctctggaagaggctctggggatggtggcggtgaaaaatatgatgccgatacagcccggcgatgtgctggaaaccagcgcagataccaggccgctgtatgatgcggtgggattcaggccgcaaacgacggtcaggcagggggtgaagaacttcgttgactggtataaagcctattacaaggcgtagtcatatcaggcattgtggatttagccgcagcagaacgctactgcggcttttttatatctgaaatggtcattggataaacttatccatccctgctgcgagttgagatacgtcatttattcatgacctgccgctgaaaaccacacaatacataaacgcagatttaacacgaagcaaacaaaaccttcaacaaactctcatctaagccacttccattaccctcactgaagagcattaccttataaagcaaacaatccccagctcatcagtctgccagcaaagtcggccacagcgctattgttcaacgtaacggtaatgaaaaagttttttccacttttctcaaaaaaaaccacaaacaccatataggaactttcttaaattcaggctatgttaagcaggcaaaggcatgcttttgcagagatattagttcgcaggcaaatggatttataacattcctttcattctggtacgcattatggcaaacataattttcttagcagttgctgccatcctgttgattgtttcagtctattttctgatttcttatatcaaagatcagaaaaagaccaagctgacttttaacaaacgaaagtggtgaaaagaaaacttaatataattataatacaggcataggaaatcataatataaaaataaaacactgccagcggtggggatacgcatagtctttacagctggcattggatatctttttaaaataaaaatgtcatattaaactgatactatatccttagcatcagcacgctattctcacggccatgaatggcttgcgtttgctatgcctgcgcccttcccttgaaagatcccgcccctccccgtttaaatatcaatcagcgcctcaccgcaacgcagtacgcctgagagcccgggatccagaaacaacaaaagcctgcaagcaggctctgttttaccttccggcgcttatctccagcgtctacatcacagtgacggtagctcttcacaaggtgaatttaacatatccgacctcaatggttgggacaagatgatcgattgaagaatttaagcgaggtcacgttttttaatgagttgagtcgggaaagaggagcaaaacgatttgtcgggcgaatagctgaacccttcaggagagaggagaactctggccgacagcgcatctcccggccagaggggggatttagtcactaccgaacaaatcgcgggtatatactttgtcagcgacatccgacagctcttcagccattcggtttgagacaatcacgtcagcttcttgtttgaacgcgtcgaaatcgcgaactacgcgggaattaaagaactcatcttcctgcataaccggttcgtagataatgaccgggatacctttggccttgatacgcttcatgatgccctgaattgaggaagcgcggaagttatcggagccactcttcatgatcaggcgatagataccaacaactttaggcttgcgcgccaggatagagtcagcgataaaatctttacgcgtgcggttagcatcgacgatggcaccgatgatgttattcggtacagattcgtagtttgccagcagctgcttggtatctttcggcaggcagtagccgccgtagccaaaggatgggttgttatagtgattaccgattcgcggatcgagacacacgccttcgatgatctgtttactgttcagaccctggctttcagcgtagctgtccagttcattaaagtaggctacgcgcagcgccaggtaggtattggcaaataacttaatcgcctcagcttcggtggagtcagtaaacagcgtcgggatatcctgcttaatcgcgccttctttcagcagattagcaaaacgctccgcgcgttctgaacgttcgccaatgacaatacgagacgggtgcaggttgtcgtaaagcgcgcggccttcacgcagaaactcaggagagaaaatgacgttatcaatgcccaggcgctctttaatatcacgcgtaaaaccaacgggaatggtggatttaataatcattaccgcgtctgggttaatctcggtgacatcacgaataacggcttcaacggtcgaagtattgaagtagttcgttttcggatcgtagtcagtgggcgtagcgataatgacataatctgcatcacgataggcatcatgcttgtcagttgtcgcgcgaaaattcaacggtttttccgccagatattcctggatctctttatcgacaatcggagaaaccttttggttaatcatatcaactttggattgaatgatatccagcgccaccacttcgtggttttgcgcaatcaggatgccattcgataaaccaacataaccggtaccggaaatagtaattttcattcgatcacactttaatcagttaactggacggcggcagatggccgcaaattaagcaaaactgttgatgtttctactctcaggaacaatgtaagtcaagcaagacaccaacgctctctgaaatactgtataggcctataaagggcctatacagtaaatgaagctatattttatgcttatttatatacttcagctgtctttaaggtatgagcctgcaaatccttatcagataaagagagcgtacagtctgcaatctccggccactgaatattaatctcagggtcgttccagataatgctccgctcagactgcggcgcataatagttcgtagccttgtacacaaactgaaccgtttcgctcaacgccatgaagccatgggcaaacccttccgggatccacaattgacgcttgttttccgcgctcagtaccgcccccacccatttaccaaacgttggcgatgaacggcggatatcgaccgccacatcaaacacctcgccttcaatgcagcgaaccagtttgccctgggcatgcgggtcaagctggtagtgcagcccgcgcagcacgcccttctgcgactgggagtggttatcctgcacaaactccactttccgccccactgcttcatcaaatactttactgctgaagctctcaaagaaaaaaccgcgcgcatcgccgaagacacgaggttcaaaaatcagcacttcagggatatctgtcttaataatattcataatatttctgcccgtttacttgcccagaacttctgttaccacgcgcgccacgccctggcgccagtccggcagcgttacgccaaatacacgctggaatttctcattcgacagccgcgagttcagcggacgttttgccggcgttgggtaggccgtggtcgggataccgcttactgctttgattgccagctctgcgccgtgcgaccgcgccacctcaaaaacaaattccgcgtactccgcccagctggtttccccgctggccaccagatgataggtcccggctacagcacggttgcgctgttcttcacgaatggcgattgccgtacagtccgccagcagctctgcgccggttggcgcaccgtgctgatcgttaataatcgacagcgcctctttctcacctgccagacgcagcatcgttttagcgaagtttgctccgcgggtggcatatacccaactggtacggaaaataagatggcgcggattcgcctgctccagcgcgatttccccggctcgtttggtttcgccgtacacgttcagcggcccggtcgcctcatcttccagacgatagtggcttccctgaccgtcaaacacatagtccgttgagtagtgcaccatcagagctcccagcttcgctgactcttctgccagcaccgccacgccccgatcgttcagcagatcggaaagctcgcgctcgctttccgctttgtccaccgcagtatgggcagccgcgttcaccactacatccggttttaccgtacggaccgtctgcgcgatcccttccaggttggtcagatcaccgcacagcgttttatcaaaaaagtccacggcaaccacttcgcccagcgtggacaacgcacgctgcagctcccagcccacctgaccatttttgccaatcagtaaaattttcatacgttaatatcccaatgatgaccggcagccattaatgctcattcagcagacgtttcaggtaagcaccgtactcggttttcttcaaccgttcggcctgtgccgccaccccttccgcgctcagccactgcttgcgataagcaatttcttccaggcaggctactttcatcccctgacgcttctcgatggtatggataaactgagaggcctcaatcaggctgtcgtgggttcccgtatccagccaggcaaaaccacggcccagcagttcaacctgcaggtcaccccgatccagatacatctggttcagcgtggtgatctcaagctccccacgcgcggagggtttaacttccttcgccattgccaccacatcggtgtcataaaaatagagtccggtcaccgcccagtcagatttcggcttcaacggcttctcttcaatcgacagcgctttaaagttctcatcaaactccaccacaccgaaacgttccggatcgagaacctggtagccgaataccgtagctccggatgttttgctggccgccgcatccagtttgcggccaaagctctgaccaaagtagatgttatcgcccaggactaatgcacaggcatcattaccgataaacttctcgccgatgataaaggcctgcgccagaccgtccggcgacggctgaatcgcatagctgaaattcacgccaaactgagaaccgtcacccaacagacgctgaaatgcgggcatatcctccggcgtggtaataatcaggatatccttgattcccgccagcatcagaacagaaaccgggtagtaaatcatcggtttgtcataaatgggcagtagctgcttggaaacaccctgggtgatcggatataaacgcgtgccggagccgccggccagtacaatacctttcatacttctttcctttttagttgttcaggccaagacgttcaccggcataggagccatccagcacgcgctgccaccaggtcgtgttgttcaggtaccagtggaccgttttttcaattccgctttcaaacgtctcttcgggcacccagcccagatcgcgttgaattttcgccgcatcaatggcataacgcaggtcatgacccggacggtctttcacaaacgtaatcagatcggcaaactggctgatattgcccggcttctgttcaaccactttatcgagaatggcgcaaatggtgcgcacgacatcaatatttttacgctcgttgtgaccgccgatgttgtacgtttcaccactgcggccttccgtcgccactttgtatagcgcccgggcgtgatcttccacgtacagccaatcgcggatctgttctccgttgccgtacactggcagcggtttgccggcgagggcattgaggatggtcagcggaataagtttttccgggaagtgatacgggccgtagttgttggagcagttggtcaccaccaccggcaggccataagtgcggttccaggcgcggacaagatggtcgctgccggccttggaggcagagtacgggctgcttggcgcgtacggggtctcttcggtgaacagatcatcggtaccgtgcaggtcgccgtagacttcatcggtcgaaatatggtggaagcggaaagtctgcttctgcgccgtatcgagagctgaccagtactggcgggccgcttccagcagggtgaaagttccaatcaggttggtctgaataaaggcagcaggcccatcgatagagcggtccacgtgactctctgcggccaggtgcatcacaatatccggacggaaatcgctgaactgctctgccacagatttggcatcagtgatatctgtctgagaaaacgagtagcgtttattaccggcaaccggcgccagggactccaggttaccggcgtaggtgaggcaatctattacgcgtacttcgtcggaggtgttttcaatgatatgacgaacaactgcagaaccaataaaacctgcaccgccagtgacaaggatcttcatatttaacttaccttttattaccagagcctaataaaattcgaaatatattccttaggatatgagtatcatattaaatgatttcctttagaaaaacatttgcaaattacgtttttaaaaaattaggataagggagtactaattagaggagaggaattctattttttgaaaatttatgcccgggttaataccccgggcaaatgacactataaagtttattccatccactcagtgtggaacacaccctctttatcggtacgcttataggtatgcgcaccgaaatagtcacgctgcgcctgaatcaggttagcaggcaagactgcggaacgatagctatcgtagtaggcgatggccgcagagaatgtcggaaccggaataccattctgcacagcatatgcgacaacatcgcgcagggcttgctgataatcatcggcgatctgcttgaagtatggtgccagcagcaggttggcaatgccggcattctgctcataggcatcagtaatcttttgcaggaactgagcacgaatgatacagccggcacggaagattttcgcgatctcaccgtagttcagatcccaatggtattcatcagaagcagcgcgcagttgggagaaaccttgagcgtaagagacgattttgcccagatacagagcacggcgaactttctcaacgaactccgctttatcgcctgcactcttcgcctgcggtccggtaaggactttcgaagcagccacacgctgatctttaagcgaagagatgtagcgtgcgaatacagattcagtgataagtgacagcggttcgccgaggtcaagagagctctggctggtccatttaccggtacctttgtttgccgcctcatcgaggatcacgtcgaccaggtatttgccttcttcatcttttttggtgaagatgtctttagtgatgtcaatgagatagctgctaagctcaccttcattccattcggtaaaggtttgcgccagctcttcattagaaagcgccagaccacctttcagtaaagcgtaggcttctgcaataagctgcatatcgccgtattcaataccgttgtgaaccattttgacataatgaccagcaccatcagcaccgatataagttacgcacggctcaccgtcttcagcgacagctgcaatctgcttaagaatgggagcaaccagttcataagcttccttctgaccgccaggcatgattgaaggtcctttaagcgcgccctcttcaccgccggacacgccggtgccaatgaagttaaaaccatcagcagaaagctcacgattacgacgaatcgtatcctggaagaaggtattaccaccatcgatgatgatgtcacccttgtccaggtaaggcttcagagagtcgatggcactatcagtgcctgcgcccgccttcaccattaacaggatacggcgtggagtttcgagcgactcaacaaactcttgcactgtataatgtgggaccagcttcttgccgggattctcggcaatcacttcttcggtcttttcacgggagcggttgaaaacggagacggtataaccacggctctcgatgttgagcgcaaggttacgccccatcactgccataccgacaaccccgatctgttgcttggacattacatactcctgtcaggtgtggtcactgcgacaagctcgcagcttaaatgtgactactatgttagcttaaagcttctcaaccgtatagactaaatatttattctagagaacgagttaaaaatgaaataataaatagcatgtaaaagccttatccaaataccagtaactaattaaaaaaatttattttcatgtgcttattaaatgctttaaacaatcttttatcaattagcattattgatatgatataaaataaaaaagaaagtacactaagtgaaattaattttacaaaaccatcaatattctgtagaaaaatgacattattcattaatagcttaataaaaaaaatcattagggcagaacccaacattaacttataaatcttcgaaaaaaattcgagaagagacccatctaaaatttttaatacacaccacatcacagggatgaagtttaaaatatttgcaatgaaataaaactttgcaaaagtcacaatgtcaaactgaacacctaaaataaaagaagagacctgaagaatcatccccagaaaacctagcttcattaatatatatgttttacccttagccataaatatagtgcctgaggtacttagtacagcctgtacgataccagtaggtgcaagccaagtcaaaattgaggctgttaaaagccaactatccccaaaaacaagtttaataaatggctcacttaacatagcaagacctgtcattaatgggaatacaaggagcaatataagatacaaagtattgtaataagtttttttaatttttcgttatcatcttgatactcactaaacacaggatagagagccctagaagcaacaaaagtcatattttgcactgggaaaagcataattctataagctagtgagtaagcacccagaatagctgatgataaaaaatgcccgataataatactatcagcattccttgaaaaataattaataaagttaaaaatggtcaaattcccactaaaaccgatcagtttttttatctcttgcaaatcaattataatttttgtattaggcctccattctgatttaaaccaaaattgaatagttgacatcaatgagagaaatatgctctgaaaaaccaagctataaacaccatatcctctataagccagtataatagcaattgaaactgcaattactgatgacgatatttcaataaaagcaatctccttaaatctagattttttttctaacaaagcaagatgcgctgatgccgtactagcaagaggaaagctcaatgataataaacataaaattagaacaagcctctgttcatgaaatatcaatgatattatcggcgatgagatgaggatgatgatagctatcgcacatcccatacacacattaagccaaaatattgcattaatagttctttcctcaaggtttttcttttgtataattgcagctgcagtccctaaatctctaaccaatccagcaaaattagttacaaccaatgccatagccataagcccatactcgccaggcggaattagtcgtgctaaaaccacaatatttaataactgtacacccacttttattccctgcgagagggcaacccacttagtgtttgataagagtcccatacaacctcagtaaagatcatttaaacatgaaagatcttttaattagatattataaatcgaattattttactcttaacctcatttatatgatatatgaggaaaaatcagaccagagaataattaaattatgacactaacgatatccatttgttttttatttcttgactatcgaattttaaagaggtctttttggtgtttttgcttaatttaaagtaacattcatcatcagttgataaaagattcattttctcaacaaacaattctttgttattaattggaattaagaaaccatcaatatcattctcaatgatctcacgcggtcctgtcggacaatcatacgctataaccggtaatgaccaagattttgcctctagcaatactaacggtaaaccttcataacgtgatgtcataagtaacatatcactctgtgcataaaatttatcaatatctttaactttacccaataatgtgacagtatcttcaatattataatttttgataagttcgcttaattgctggtgaagtaaaccatcacccgctataaataatttccagtttttattatttatagaaaaagatcgccagatatcaagcaataaatcaaatcctttttggtgctcaagtcgcccaacagccaaagcatgataagttctgttgtgcctatcaaagtttttaaaagaaattggattggctatctttaaagagttaaccccccatttttgaagaatagttttgtctttatctgttaaaactataactttgtcataaaatcttaaaaagatgaactttagaaaacggacaatgctattaaatgaatggattgcgacatgctcgcaagcaaaaagcttacaatcattgtttttaaaacgtgaaaaaatattccaaaatgagtacattacactcagtttacccatacttataacaaagacataatcgaaattgtttttatttacatcatcaacaatctttttaattggatttttatattccttgtaattaattatcttttttactttcctatatggataaaaactatctccttctccagatacagaaaaaatagtcaagtcatataactcaccatagcaatcactcataaagttacatatattttctgttcccgcatatgaatatgcgttattgatcacaaatgctatttttttcaacccaacccccttatcacaaatattaaattaacgatttactattaaaaaagaaatagcattaagtatataccaagaaaaaaaatatagtattttaaaagggttccccttgtatctttgagtcagtatatgaaaatgccatttcactgcatttttcttattggccgaaagtgaatcatttaaaacataataattaaccaaaccttcactaattacatacgcttcattataaatatcaaagtagcttgctaaataaataaaatcctcatgaccttgatctttgaaatatatattttcatttaaacgtttaatacatacagacgaaaaacatacgcgaaaatgtttttttaaaaaactattttttttcaaaacatttgaattaaacttaattacgtgttttttattattaatatcatagaaataccaagataacaccatgttataccctttagatatagcatccatttgtttttctaacttatcaggaagccattgatcatcactatccaaaaaagctataactttttcatttgaatattttagccctgcattccttgactcagccgcccctaagttttgatcattattaattattgttattttatcactcttatatctatccatcaccatttctaatgacgaatctgtagaacaatcatttataatatacaaatgccattgagtatatgtttgtgaaaatacagattctatcgctctgattattgttttctcagcattaaacataggaataattactgcaacgtatttctcatcaattttgtccatcatactccctctggtagagataaaaataatatagcaagattctcatatcttaaataataaaaaattttaaaagagtgggaatattgcattaagataatcaatctagaagacttctgacatcttgattaccatcattaaattttctggcaaaataaggacaatatgtaatatcgtatgttttattataaaaaaaatcattttctttaaataatgaaatatgcttctcagtcaaagctactggcgggtttacaccttcccaatcagtataccaaataccaggactcacgttattaaagaaatcagaattacctataatagtcggaaagaaagactcttcggcacaccaagatgtcttaaaaaagtcaacaaagtgagggtttttatccataaaatcaagtatataatcaacacatgatcccgagagggcacaccatgtcgatccatgataaattgtgctaaaggggtaatttttcttccgatatataattcttaaaaacctttcagctagcttatatattactgtttttaacgatttactacgtctatcaaaacaatcaaagtaatgatatctgatgcgatcctctggtttagtctggtgaaatccttgcataatagtaatatattctttattcttgcttagcaattctaaaaactctgagcggtccctaattgggtaatcttgaccactcataattacatagtaatcaggtttctctttttttgcttcatttatcaaatctaaaattgcctgttggtgagaccatcctccccaccatacttccactgtgctaataatagtgagatttttttcattttgagaaaatgatgtaaaaaaatccggaattatagtttttttgtctatgtgtatgtaaactaatgaattgtcaactttaatttttttaatcaatgctattaaatgattaaaattattataagccgttattaaataagccactttcattatatcaccatgtaaatttaaaaagaatcaatatttccaattagccttccatctaattaccggaatattgttatcccaatcaattggtaaccagatatatgaactatctttcaaactattactttgccaccgaactgccataaaaatatatgtgttattagagccaacattctgtattacgaaggttccttgagaggaaaaagtttttttaatattatcaacatcatcagagcgaacaggattacctaaagaaacccacggtccaaatatattatcactataggaactccgtgcgtcagtagggctaaacccttttagcccagatgtaatcatataatatttacttttgtatttaaacatcgtaggggcttcgttcattaaacctactaaaactcttgaatatctcccagtgacgcccttatagctatcatccaattctgcaatttgtatcgagtaattcccctccgactcataaattacataagcagtagaatcatcatcaacaaaaagtgtcatatctctaaacatctgtccacgggagaaattgtctttaaaatcattatcagctttaaaaacattattatgataatatttattattaatatcatgtttatccacataaattggatccactgatgcattaggccaaaaatctttatacaaaacataaggtcctgtgattttttttgcaacagctataccggctttacctgtgttatatttacctcccaactcttcatggaaccacattacaaactctttatttttttattataaataactttaggtctttccacagcgatcattgctaattttgatgaaagatctaaagcaattccttcattatgccaattatataaatcagcggaagaatatacgcttaccttcccagtattttttcttccatctgttcttgcttcaccaaaccaataatatttatctttaaatttcaacacgcctcctccatgtgcattgatgacctcgccgttattatcataccacggttttcctggtgtaaagttagagttactacaagctgaaaaagagaaaaaaaataataaaagcataatattttttaccatagaattatccttaaggaaaaactccataattacacattagaaatactgtttttcagttaattaacagagttaacaaggaaatacccaaaagagaggataaaactagtacaaaagaatactaaaattttccataactaaaaacaccgtagtaaagcacactgaaaatcttgcttaagtcaaggacttgcattataaagacaagtgaaggttgtatttcattgagaatagtagaaaagccgagatattcaagtcgcatgatattcactactacacatgaaaaaattaaggcattactgcaactatgatgtcattttaacctaaaatcaagatagaacatatatttcaccctgaaaatcattacatagttaatacttgcatatagaatagtgacaattattcataataaaaacagtttgtattggattaaataactcagtaaaattgacaaaggactcaaatataatattatctgtcatctagttaaagcatacatgatcacgccaaggcatttatacatatataagtttaagcgcaaggtttaatttataacaccaacactgcacacgttataataatcattcactacttaatatacacaatgaataatatatagttagtatactgcacatccgtatactcaatagtaatttaagattgaggttctcagcatttttacttaaagatgctccctaaacaatcgaacaaatatactttaaaaaactaaaaaagtctgtaaatacactcgttttagttcaatacactttttaaaactctaggttcttcgacgattgcgcggtattcttccggcgtcaggttattcgggagttcaaggggccgctcgctattatattcagccagccgcactctgtaatttcccgtgattcaatcagcgatttgaatgaataaaaatttaatatttctatgctgcacgcccgtttaaaccgttcgacataggcattctgcgttgacatgtcaaactgataaatagcaacatcaacacatgctcttctacccattgtgctagcgtcgcaagatcagctccgagccgttgtccatccgcaatttgccactattcaccattctttctaagactatacgactgacagcgtcatgatataaaggtcaactaccctagacagtgcttcacgattaaaatcggtcaacaagttgaaggtccggcagcgtctgacgcataccagcgcatcatgcataaagcagactgaccagctttgattcatctctgctggtatcaccagcagcgccggattgcgcaccagcaggcgctgttttatcttacagcgaaaatgcagattcggcacacaataaacaaagtaaactcttttatggttcagctattgccctgcagcgaaggatcaaaaaatctttttaaatccataccacaaatatcgttcagctgtaatgattagcatcagaataaccgactcatcgagtcacatatccggccgataatgcgggcttagcggcaaacatccttgacggtgcgtccggcttatactgacgtcaaaacagtgatgatctggtgtccggtgaatcggactttgcgcatgacgattttgaattattagcgtatgttttttactaatagatttaatttttttgctaataatactctctaccgcctcatttatatcattatttgcacctaggatgttttttcattattaaaattttgataattagcttaacattacccacattgaaccacactatattttgaattaataattttgatatgctatatataactttataaaccggtgaataatgtaatatacttaaaacagtatcgattaaacgttcattttgccgccatagactatctttcgcatcagaccttgagagtgagtgccataaaaatgaagcgcattgtatattaattacctcacctttatttttgaaaccatgtatacgtctaaagaggctaaagtcaactccatataaagcaaaccgttcatcgaataaagtaataccatttttattaaacaaatcaatcaatataggatagatgattaatccagagccaatagataatacatattcgtcattttcaaataatttctcgctataaaccaccttattatcagcggctggataatatatatcattagtcgcttttgatttaatcaaaggcagttgaagagctatttccaagttttctttattatcatcaatgtctgaaaagaaagatcctggaataacagtatcatcatcaaatatgacaaatcgctcatattgtttgttattgcttagaaattcattatatataatactcaagggcttattagacatatcttgacataacttaacagacaatatcttagcttgtagttcatcaaacaataaatctttgtctaagagcttaggtccattattatatataattagatcatagttagtaaacttattatcattcagtgagatcaatgtttcagattgattgatagatttattatataatattactaagatgatagttttcatagtcatttataaatttacttaattattttttgatatataccatatagttttggtaatctatatgtcatctggtatttcatcactctcttgaaaatttctgagtgttttataagttcaaaactcagaagaggaatattttgctttctgttaagcatatccatatatttcaagctgattgaatccttttcagttaagctattatgatgcttttctataaatttttgatatcctaaataagccttactgctcgttgttattcgttctctattagccccatcgtccaaatacatcgtacatgcgtttaatttatatgcatcaccaaattttttaattattctgaaccaagtatcataatcttgccaagctggcatgttaggatcaaagccaccaatagcatcaatcacagatttttttacaaaaacctgattaccaacacaattatattgtttgatatcattaaaggtaattacttttcctccttcgcttagagtttcagattggacattgagaatgtcatcattaagtaatttaacattagagcaaattagtgagaacttatcttcattactaaaatttacaaagtattctaatcgtctcttatggaaatagtcatcatcgtctaggccagtgatgaattcacctttcgcaacttgaattgctttatttctactaacacacgcaccttgttttttttcatttacaatgtattggaatccctgaaagttattttcaaaggcatttatcacattttcatactcattagtatggactgcatctgatgcatcattacatactatcacctcaaaattttgatatgattgatgcctcagagaaagtaaagctctatgcagaaattgaggtctgttttgagtcgtgatatatacagttactaagttattcattttaaccaccatgagttataaaatataaatctatttttcgttactcacacgatcctttatccaatttccatcattatcaatttgacccagataagatctaaaatcatctgcactataattagaaagtaataacacagaaggtacatataacgtggaccataaacccgccataactatttgtcttctctctaaataaatgttcacaaatactacgttaagaaaaataattgccaaaatgattagcctcactgatttttttattttcagcgcactataagaataacaaaatcctaaaacagccaagtatggcaacacacctaaaatatagcgaccgaatgctgtagctgagactgatgtaatacaggatataacaataaagactcggataaaattatcaaatcttttatactctccatctcgacgcagatagaaaaacaaacaaaataataaaactatcgttttatatgatgacacaattaatttgtttgtattattgccaaattctgataaatcagtgtcaacataaccaccgataaagtaattagctaatccaaagggattaaaatgagcaaaaacatatggcaaaagtgttgaactcgtgaaatagaatatcagcgctaataatattgtttgtaatttgcttagcctaacaaaaaatgaacctattaccgccataagcactaatatcattgccgaatgcgtaatacatgcaagtaaagaaaagaggattcctctgttggttttcttttcaattaaaagcaatgacacacctcttacaaccaatgctactgagaataaaaagcgtaatgtagaggctaatagaattatatcaacaaaacttactgcaaaaaagaataacagtttaatatttggtgttctatagtcacctgtaacctccttttctttcccgatcacatttaaaattgttgtcgcgaaaagatagaacgataaagaactgtaaagagcgggaataaaataaaacgggagccctattttatagaataataaagcatttacataaaataatatgtcaacatgaccacgaatagcatccatatatgttgtactttcattgtatagcatatatgtatcaaggaaccgtctatataaatcttgccaaggtggtatttttattgtaataaaaaaaacaattaacgacagaataataattattcctttcgcattttttttattaaataagaaaatggaccctaaaattgcaataaaagggttaagcattgatgctataaagagtaaaggtaagtctttacttattttcattttatacctgctaagaatagattgcttaaaagatcacatcaaaaaataacctaataagcaccatctctctttaagacaactccaatagttttaaataggatagctatatcattccacatagaccaatttttaacataccatgcatcaaggtagactcgtgtttcataatcaacatcacttcgaccactaacttgccacaaccctgtcattcccggcttacttaaaagataataatcaacttcatcattatacctttccagttctgctgttataattggtctgggcccgacaaggctcatctcaccttttagtacattaaataattgaggtaactcatcaagacttgttctacgtaaaaaaccaccaattttggtaatacgcggatcattttttaatttaaatgttgcatcccattctttttttgcgtctaaatcagtctctaataaattatctagcacttccttagaattggttaccatcgagcgaaatttaagacatttaaatgacttaccatctttaccgatccgctcatgcccgtaaatagctggcccgccatcctgctttactttcctgctaatatagtataatactggtgacagtataataattatagatatagaaccaactatatcaaataagcgttttaaaattcttgatgaccacttagcaagattctgttgtacacgaaaaatcataacctcatggctaaaaataaatgacatatctgtactatctaaaggcatccctcgcagggttggaataactgatacatagcgaaaacctttgatcataaaattacgcaaccaagtattacgcatttcactttgatgagattcaactgcaacaataaactgagtctttttatcttttgtcgctaaccagtttatatcgttcgatagcacaccaataccttcgatatattctcccgcaggagtgcctccctcactagcgataaagcccacaatatttaaaccgaggtttcgctcactacttatcgccttataagcttcaaatgcattatctccacttccaataatccaagtatctcgttgccaatagcttaaggtattcagaacgctcttagttatcatgcgtgcagttggtacaaaaatcagaacaaaaagccaagtcagcatccaaagagaccgcgaatatgaccatgttgtaaaagcaataatggcaatttcaataatggcaaaaatcaccaaagtacggagtatttcttttagttcaaaccagaatgttttccgataaaaataatgccgtaacctaacggcgtaccatcccacacagcaaaatgctaacaaccaatgtaatgcaacccacccctcattttgggaaagatgtgtaatatattcattttggctcgacataaatgataataattcgatcgccaaatagattgagataataaaactaataaaatcagataaggcaagtgccacactgactataaaattcctgctgaggagtgtcatgattccctctcaatatatgtaatcttctatggattttataattaacacagcggattataaacttactgaagaaaaaactagccgagcattaatagctcggcttatgtattttatttatcgtcagtataggaataaccatagtggttataaccatagccataataactgctagcttttttcattacaccattaaggatacatcctttaaccataacaccgctttgttcgaagcgtttaaaactaacttcaatttcctttgtagtattttgttcaaatctggcgattaataaagtcgtgccaacataatgaccaatgatagcagcatccgttacagctaatatcggtggggtatctagaataacaatatcataaatcccgcttgcccagttaataagctcaccaaatctgcgatgcattaacaactctgcagggttgggtggtacggcacctcgcgatatataatcaaaaccggcatttgaaacagttttcactgccttatttaattcagttttaccagaaaggatatctgaaaggccattctcattatctaagttaaataatttatgagtatagccttttctcatgtccgtatcaataaatagaaccttttgtcctgtctgcgctacaacagcagcgaggttagaactcacaaatgtttttcctgcattaggactagcaccagagatcattagaacgttgttccgcgcctccatcattgcaaaatggagactggtgcgaagaccacgaatagcctcgatcgccaggtctgctgggttttctactgctaaaaaagcttgatatcctatttccgtttttttcttcagtctaacagattgctgacttcttttcacaaacgtttctgatacaggtatactagcataaacgtttatacctatctcttctaattgctccgggctttctattccgcgacgtaagaacactcgcagtaaaaccagtcctactgataccatcccacccaaaataataccaacgaataatactattacttttttgggttttactggtttgggttgtgatacagcattatcgataatacgtacattaccaatcgcgcttgatttagctatactaagttcttgctgacgatttaaaagctgcatataaactgcttggccagagtcaacatcacgacttaattgtagtatatcctgctgagttttaggcattgccgaaacacgttgattaagccttgctttttcttcttgtaaagtcttccgcttctccatcagcgctttataggttggatgctcttttgtataaagttgagaaatctcagattctcggaatgtcaactcgttcagctgattatcaacatttactatctgctcaagaaccgattttgcctctaaagaaagatcaattgagtctttttgccggcgatattggtttagtttgtcctctgcaatatctaattcattgcgtacctttggtaattgcacgttaagaaattctaaacttttagcattctgcgctgcctggcgagccacattttgtgcaagatagttattactaatactatcaagtattttttcaagcaacaggggatctgggccacttaatgatagatttaacatcccagtatcttttccctgatcgacgacagagaacatatcttgtaaatctgaaattgcctccagtttacttacatatgatatgacaaattcagtttctggctctgcctctatttgatcgaccttaagagcaataccattcatatccaataaagagccaacctcacctgacatttgcttatcattaaaaataacactgtaatgatttttatcctttactgtcagcttcaggctaggggtatccgatccgccatccgacggtaaataaagacggctaactgtcacacttcccgctctcttgccggttagccgcgaccatcctttaccaaatattgggaaatatttctgttgaactcgggcctgtaaattaaggtcatcaactgtttttcccaagatcatacgagattgaagcaatgctatttctggcgctgactgaggttgactatcaggtaacatctggctaaggctattgagtatcgcatttccctgcttttgttctacctgtaagagcgcatcggcctgatagacaggagtcgcaaatagtgcatataaaagtgcgataagcgtaaataatgcagtaacggatagaataagctttctatgatcgataagctctcctaccaaacgccctaaatcaatttcatccgtctctttctcgacaggtctgctttttactgatgacatgcaatgattcctgatatttatgcgcccaatttctcggcccaacgtaagccagccagttcaatcaactgatataccgaagcaaacgcttcatcacttttccggtatggatcagggatttccttttggtttagccattggccaaacagcattgtttttcctcttgcttcgggagcaatccgaccaatttgttcaagatgagatttttccattacgagaattagatcatattgtcgacctaatgatgaggtaaattgtcgccctttgtgccctgttaatgaaagaccatgtttttctgcaatccttattgcactttcatctgcactatggccaaccaaggcgccagtacccgctgagtctactttcttatttggcaacgtacgccgtaaaaaacgctcaccaattggtgaacggcaaatattgcctgtacaaacaaccagaatcgagtcaaacataatcaattccaatttttaatatagcggacggtttcagtcatatcatgtacaccggttatagtcggtaccagctgtgaaattacacgattccaacgaactaaaggtgctgctgttacaaaaacaatatcatatggttgcaactggaactccgtacccaataccatagcagatgcatcttgtgcatttagctgataaatattggctattttaccttgtttgtcccctttcaattggcggataacaaatactcccgtcgcgtcactaaggctctgtgacatgccttccgcatttcctaatgcttcagcaagtgtcataccactgcgatccattttcatggtgctctgtttacctacctcacccataacaaagactttcaaatcgtcattgcgaggtataaataaaatatcaccaggataaagcaaacgattctgagtgagatcgcctttttgcatcagtgcgtacaatgatattttggaatctttaccattatgagtcagcacaacatttcgccaatcggcatctgtagcaagaccaccagcagcattcactgcatccattattgtcagaggtatattggtaattgcctgctggccagatttggtcacctccccagtaacatatactttctgtgatcggaaagcagcaatgcttacgtccacctgcgggctttcaatatatgttgttaagcgaccagctatctcctgccgtacttggcttaaagttttgcctgcgacctgaaccttgccaatgtatggataaaaaatagaaccatcagaattcacccagttacccgtatcactggcactacgatattgaccagcaggagtagttaactctggatgatcccaaacagtcaccataagcacatcgcccacgccgatacggtactcataacttttcagtaaattgtctaactgcggattcgggcgagccatgacggtttcgggacgaagttggtcaactaagcccggagtcaatggatagacattcaccagtttatccaggtcgtaatcgctatccggcagctcaaccacattcttacgaaggctattcaacccttggcccggcatgattgtacagcccgataaaaaccctattgctaatgccaatgccgaaaatctaacaatttttttcttcataatgtcacatcatcagtaaaccaaaagtttctaattcccaaacaacagcccatttccaaagctgcgtaaaggctataaattaaatgggatttctatccccgcgctcgcacccacatcatcgctatcgctattgtctgcatctgtataccagagagaggtgttcaggcgtaccgatttatacacatccccgctccagcccaattgtaggcctttcaaggtatccgaacgaggaaatgcattattaattgactgattttcgggattgactttcgcatacgctaaacgcgcactccaacgttgattatcctcggtcaccagctcgacttttcctgcaaagagctgaccatcgccccccattgcatcgccgagtgaatatccctgttggtagtaaccatctttgtagatatggtgcgtatagctatagttggttcggctcatattcgtccgggtatcatgagcttccagataccagttgatagcatctttaccccaaccgtgatgcccttcaacgccaccaaggaacatattcgctgaaggtaagaaaccagactcgtcttcaccaatcatctgcccatagacactaaccggccagccaagtgtgggttccagcttcaacttaaagtcaaatccagccaactggttgccgggttcattgggatcgtttgctgctgtattatctttgccggtcagaccatcccaaaaattactaaatgactccggtctcccctccccgccccactgcataatgcgcgatgcgcccagttcaagggactggaaaggagcaaacgtcagacgcccgccgataattttggtatgcggtacggcggtatattgattcatctggctagcggaaatctgatactgccatgggccaatccagcgcagccaccaggtttccggtgcggcctgttcagcacgctgcattaaaacgccggtcattggccgcatcgcatcaccgcggatcaggctgccttcataacccggcccccaccactgcggcatctgaccaaatgagagccactggttccagaacttaaccgcaccataggcgccgttagcattaaaacgtgaaccgttgctgatgcgctcgtcaccttcaacgttaccctgcaggtgcacatcccaccattcgccgctgttattaaaggctaatgataaagagctatccgcaggctgattctgaccaaaaccctgcggcgttccgggcttatccgttgaggtgtagccgctcacacgaaaatccgcttttaaagagtcgaggcgctggttgattcgcgccagaacaacctgttcggaagagtaagagggttttgccttcttaagggcccggttaatctcttcctggctcagcggccaggtcgacaggctgagatgaataacgccacgatcggagagccacgccagatcgttgcgcagttcgttgtcattcatcactaacccggaggcataggcaagtgagctggcagaagtaagcagccctaatgcgagtgcgattcgcgcaatttttatcattgtacaagatccatttaaagccccgtttccgcaagctggtgcgacaaggggaacactggtagatgcagcgccctctgacgccaacctttgctatgtttggtctacaggttttggcccaagaaaacgaaagcatgccgatcggaacgccgtgctaaagctcgttttctactcgcaggctacctgcagtacacaatgtatgcgaaattgttattgaaggctattccatcgcacctcatacccgcagtttatcagcccgcctcaagatgaataggtcctgatttgatgacaactcgctagtatatacaggttgcgaagagaatcacctgcatggagtccactttaggaatttctgtcgcataaaatgagatgtgatatagagaaaaggcctggtcgcaggtacgctaccgcccttggcttaacagctaccaatgcactgtacttctttccctgtaaattcgatcgtagattccgataaatcggcgattaatccatcaaagcaaacaatttcgcggccataagtttacgagattctaccctcaattgggagcgtaatctcacattatcagttacgttgccagcgccacgaaccaattgccgataacgctattgttttctgctcttcacgtaaaaacggaaccagtacaaagcaactgaataatctcaactttatgattttattgcttttttcaccacaaaaagtgtgttgacttagcttcaagttaattatagttagtcaactacaaaaattgatagtaaaaagaagtatgccacgctgttgttatcattaataaattcgatatttagacagaaaacttatttaggaaacatcctggctgattatcattgcgctaattattgcgcagaatgacccagcacaaatttatttcatggatatgaaatatcgccgccactgacactttcttcataaatttcatattgcatacaatgtgaacacgacatgattctttctgaatccttcatcttttccacgtttgtctgaatcagtaaaatcgcttatgcagatcggctcgggtaaaaggtttttccagtgggccaatcttcaccgcaatctcgttcagcaaagattgggttggcgccttcgcccccgtattcagcagaagcgccgggataaccaccatgctcgccagactgccaaaggataaccgcgctgtatgagtggcgcgaacgcgtgactgtagcagcagaaaaattgcgctgcctgcggctcccagcagtaagccggcaatgacttcagaagttgaatgtgcgtggaccatcagtcgggagtagccaaccagtccggccagagcataacccactatgacagcagtaaaacgaagagctggtgtagcacgcgcgcacagcagccataagaggattggccagaaagctgaagataatgcggtgtgcccgctaaagccagtgaagtccagctcgcgaatcccaataccccaacccataaatgccagttttgatgcgcagacaattgcgccggttatgccaaacagcagcgcccagtgccaggccagctgctttgaatcttttcgcagaaaaagcacgataaacaatactgccgcactgggtaacagtacggtgctatcgccaaaaaaagtgacaacctgccagttcatttatctttcatcctttgacgatctctccagttcgcaacgcctttcccgcgacatttgtgtgggcgtatgcaatcgttaaattcacattaatatgcacacgctaccgttgtttaatgcgcaaacatgatctcagtcaagttttattttcatgttacaccttgactaagggctgcttacttaagaaaaatcttagtaagtaattatcagcaaagagtaaattttgcttgtctgaccatttcatcatgctgcgtcttattcgactaccagaagtctccgaacatttgctgcgttcaaaagcgatacactataacaataaaaccagctaactcattgtatttatagggctattaaccagttctacgcgcagtatctgatattgtgaatctgacgttgtgaacggccacgaatcctcttttcgtcatcagataattcggaccgttcactctcacgcgctaataagcactgacgcgaaaactacgccagcagcttcttaatactctcgcggaattttgccccttctttatggttacgcagcccgtagctgacaaaagcctgcatatagcccatttttttaccgcagtcatagctgtcgccagtcattaacatcgcatcgaccgactgttttttcgccagctcggcgatcgcatcggttaactgaatacgtccccaggcgcccggctcggtacgctccagttcagcccagacatcggcagagaggacatagcgccctaccgccatcaggtcggaatccagagtttgcggttcatcaggtttttcgatgaactcaacgattcgggcaacctgccccgccgattccagagagtccttagtctggataacggaatactcggagagatcgccttccatccgtttggccagtacctggctacgacccgtttcattgaaacgcgccaccatcgcggcaaggttatagcgcagagggtcggcgctggcatcgtccagaatgatatccgggagcaccaccacaaacgggttatcgccaatcagcgggcgcgcgcaaagaatggagtgacctaagcccagctgctggccctgacgcacattcatgatcgttacgccaggaggacagatagcctgcacctccgccagaagctgacgttttacgcgttgttcaagcaaggcttccagttcgtaggaggtgtcgaaatggttttctacggcattcttggatgaatgcgtcaccagcacgatttccttgatacccgcagctacaatttcatcaacaatgtactgcaccattggcttgtcgacgatcggcaacatctctttcggaatggccttggtggcgggcaacatatgcatccctaatcctgctaccggtataactgctttcaaactcaccattttcatatccacccgtatggttataaaccttttgatcctgtcagtttgtatgtatcactggcatttatcagtgatgatacacgcttgatacctgccattctgtccgtcaaattctgaaattacacgctgaatttaagaatacacgcaaagtctacataccaatagacagttttaagaaaattcttatacgcatagcttctaaagaatttccatttaattacaatgagttactcaccagcagcaccttattttattcataaggtagcgtaatgacgctcatcgcttctccatcatttctcttttaataccttgtaatctttcatcatgaattgacacagaacaagtgactgcaaaaaaataaaaatccagcccaaataatcaattatattgataataaaattatttaacgtacaaaagcgcctgaattgcagccaattacccgtcacgtctgacttcacggtcagcaatgatattgctgaaaaaaacgacgggcagcccgctgacttaaaccctcttcgctgctgtttttaccgcttgccatcacatataacgctcattacatcgtcctgcaaaaattgatctacggcaagccacgacattaagtagtataaaaatccaaattcaagaaaatcgttgatatatacatcaaatctattgattgactctcgcgttatctaagtaacgtatccgccttctgctgcagagcagcatggtccttcaccgctcgggtgacatctggcttaaaatcgtacgcaccgtctccgcccgtatcgctgaaatttcgcgcgttaattaataagtaccatcccatgggcgcattgtggaaaggttatatcctgcacaactgactcttttatttgttggtttattgggaggcgggttcagggctgagctaattaacagcagaaaatattgcattttatctatagcttatccatgatcgattcatggcactcttaggttgtaaaggttttaactgaatatggaatggattgccgacccctctatctgggccgggctcattacgcttgtcgttattgaactggtactcggtattgataatctggtctttatcgccattctcgcggaaaaacttcctcccgcgcagcgagaccgggcccgcgtcaccggtctgctactcgcaatggtgatgcgcctgctgctgctggcttcgatctcctggctggtcacgctaaccaaaccgctcatgacctggcacgatctgagctttagcgcccgcgatctgattatgctgtttggcggattattcctcctcttcaaagccaccgttgaacttaacgaacggctggaagggaaagatagcgataacccgacccagcgcaaaggcgccaggttctggggggtggtagcgcaaatcgtggtgcttgatgccatcttctctctcgactcggtgataaccgcggtcggcatggttgaccacctggcggtcatgatggctgcggtgattattgccattagcctgatgctgatggccagtaaagccctcacccgctttgttaacagccatccgaccatcgttattctctgtctgagcttcctgctgatgatcggctttagcctgattgccgaaggctttggtttccctattcctaaaggctacctgtacgcggctatcggcttctcggtcatgattgaatccttcaaccagctggcgatttttaaccgccatcgctttctctcggccaacctgaccctacgccagcgaaccaccgaagcggtgatgaatttgttgagcgggcgcaaagacagtagcgaactggatagcgagaccgcctcgctggttgccgatcgcgacgataacccactcttcaatccgcaagagcggcggatgattgagcgggtactgaatctcaatcagcgtaccgtcagcagcatcatgacctcgcgtcatgacattgaacatattgatctcagcgcgccggaagaggagattcgcgccttactcgacaaaaatcagcatacccgcctcgtggttaccggcggcgatgatgacgaggatatgcttggcgtcgtgcacgtgatcgatcttctgcagcaatcattacgtcatgaaccgctcaatctgcaggttctgattcgtcagccgctggtgttcccggaaacgctgccgctgcttcctgcgctggagcagttccgaagagccagaacccacttcgcctttgtggtcgatgaatttggctccgtagaaggaattgtgacgctcagcgacgtcatggagaccatcgccggaaatctgcctaatgaagcagaagagatcgatgcccgtcacgatattcacaaaaacggcgacgggagctggacggtcaacgggcatatgccgctggaagacctggtccagtccgttcctctgccgctggatgagaaacgtgaataccatacggttgccggtctgctgatggagtacctacagcatgtgccgcaggaaggtgaagaagtgaaacttgacggctacgtgctgcgcacgctgcaggtggacagccatcgggtacaaaaagtactgatagtgccgccggcgcaggatgaagatgaactggattatgaagtgtgatgatttcttcgatgaagcatcaaaagccggacgcaggcggttaaccaatttttaagggtctgctaatctgtcggccgggtagtggctatcgccttacccggccgaaaaaagccacacgctcaacgcatccctctttagccgtaggcccgcgcaggcgaagcgccgccggcaattccagaggaatgcgcattgccggcaatcttagcacgatgcgcttcttctgcttttcctggctaacttacagtttgtcgagcagcttcttcacatccttgccgtcctgggtgtttttattgcgttcagcccattcgctgagccgtttcctggcttcatcctgcagctgcttgcggagtatctggtcaacctgcaggctgtagctcagcgtctgccagttaccataaattcgcaaagggatcgccgtctgcttgagcctgtcgatgagtttgctttcgcccttccagccgcccagtacccggacgttgaagagcatatcacaatcttctttcagcaggttgagctcaccctgaccggtcagcgccatcatgtcagattggccctgcatatgcgtcaaggtgaccagcccattattcagcgcaaactcggtgctgacagagtccagacgggtcgcattgtcgtaattttcctgcgcctgaacgttggtgctgcgctcgacggcctgctgtaccagctgctggaagttgagcccttcagtgcgcgtatcagtgagctgcgttaccgcctgcccctgccagctgcggcggaactcgtcggcatcgatcttaccgccggagaactcgccggtcagcgagagcttgccggtgaggtttatcgaataattaaacgctttcagaatcgagccgatctcgacgttgtcaagttgcggctggaaagaggcatgcggcgttgcgccccgcgcgtcgagcgagccggggagcgagagtcgtccaccgtccaggctcccctgcatctgatgaatcgtcagcagcccctgctgattgctgatttcacttttcacctgggtaaagtgcattccccgccactgcagctggtcagccgtcaggttcagccgggcgttaaaaccgcgcagggcgttgtaatcctgctgaatatcgttatccgcaataaccgggcgtagctgcctgttctggctttgcccctgctggttaacgctattatcgccagaggcggaggcatgagaaagcaggctatcgaggttgagcgtgcccgcctgaaggttcagcgtccagtcaggctggtcgcccagcacgacgctgccgttgccggcaatggtgctgccgttagccgttaagttcagcccatcgaagctgagcttttttgcatcctcgacccagctggcctgcatgctggcctggccgctaatcccttcggggggaagctccgcgccgcgaagctgccagttcagttgtgaaatatccgccttcagagaatgaggataatcaccgccctgcacctgggcggagaaggaaagcgccagatcgcgctgatcgcggttcacccgaccagagaaatcgaccgtggcgcgatggctgctgtcctgctccatctgcaaacggatatcgcgcaccgtaacctgctcgccatcttcatgctgaaaaaagagcacgctatcggcaatctgtagcttctggacatcatacgaccagccgcgatcctccggcacctgaggcagcgtattgtcgtgcgggacgaccggagcccccttgctacgcacggcttcggttttggaggtcagctggatcaccgcgcccttcaacatcacctgcttgacctgcagctgatgggagatcagcggcagcagcccgacgtcaaggcgcatattatccgcgcgaataacgggttcttcagcacccggcgcggtcagggtcatgcggcctgagagaatgctgagctgcggccagacgtgccagcgcagcggcccattgagctcgagctgatagccgctacgatccgccacctctttaaccatataggcgcgaaaatcgttggggttgaccagcaataccagcgcggtaagaccggcgacaactaccgccagtaagatcatcagcgtggtcagaattcgtctcatggcatcctcagcaaaccgctaaaattatcaatccttgtcgattcgactcgctaccgcgccctgctggtcgcgatatttcgcatcttcgcggcgattataaggccgcatcgccggcccggataacggctcaaaacttaacgccccgatcagcatccccggacgcagcgccagcggcagcttacccgaattatagaattccagtacgatgcagccggaccagcccggatcgatgcggtgcgcggtgacgtgcaccatcaggcccagacgcgccagcgaagaacggccatccagccagccgacgagatccggcggcagggtgaccgattcaaaggtcaccgccagcgccagctcgcccggatgcaggaagaacgcttcaccatccggcagaacaatctcttcgctcatcacgcgatccagggccgcgctgacttccgctttaggcccgctcaggtcaatgaagcccgccgtgtgcccgcggaaagtccgaaacttatttcccagccgaacatcgaccgtcgcgccgttaatgcgctcaacgggcgggcgcgggttaatggccagacgcccctcatccaaccaggcttctatatctcggtcgcacagacgcatgaacgttctcctttaaggcattgcgcccctacgccttccggggataagggcaaattggcttctctttgcacgttacacaattcgttcgtgttattcaaagaactgactgattttggccttcaatatatcgatggcgatacggttcttaccgccgcgaggcacgataatatcggcatactgtttggaagggtcgataaactgcaggaacatcgggcgcaccgttttctggtactgcgccattaccgaatccatcgaacgcccacgctcgttaacgtctcgcttgatgcgccgcatcaggcagatatccagcggggtgtcgacaaaaatggagaagctgagttcgttgcgcaggcgggcgtcggtcagcagcagaatcccttcgagaatgatgactttcttcggttcaatatgaatggtttccggcatacgggtatgctcaacgtagctatacaccggcaactctatcggctggccgcttctcagcatctgcaaatgctgaaacagcagactatgatccatggagcttgggtggtcatagttggtttttacacgctcttccatcgacagatgaccttgatccttgtaatagctgtcttccggaataacgccgatatgttcatcgccgacctgttcacgtaattcacgatatagcgtactggcgataaggcttttgcccgaagccgatgcgccggcgatgcctataatgacgcactgatgagacgtatcagtcataaatttttgcgacctgattaacctgggaatgtaggaagggtggcggttgaccgccaaacgccgcaattatagggatttcagcgcgtcgataccagtgctaagcgcctcccgggtctattcctcctccggcgaccagccttgcgtataccagatatgcagtaaagcgtacgagcgccaggggtgccagcggctggcatagcgcgcaatccgcgccggcgtcatgccgggaaaacgctgtttaatcagataatcatccgccaggaagatatccggcgcctgccagccgcgcagcgcgaaatagttcgccgtccagcggcctatgccgggcagcgtctgcagctgctttattccggcgtcgatattctccggcgcggagagggggagatcgccgcggatagccgcctgcgccaggtggatcagcgcctccgcgcgccgcaggggcatgcccagcgcctttagcgccagcggatcggcctgcgccagccgctgcgcgctcgggaagagataaaagcccggcgcgtcggtcaacggttccccgaatgcggccaccactttcccggtgagctttgccgccatggccacgctcaccagctggccgagcaccgcccgtaccgcttgttcaaacgcatccagggagcccggcagacgaagccccggccttggcagcgcaaggcttcccagcgtcagggcgatctgctgcgggtcgcaggacaaatcaaataagcgcgcaacccgcgccaggcacgactccgcgaccggctgcagcccggcggaaagcgtcacccgcatgccctgcgcggcgtcatccggcgtcaccgtgatgagtccggcgtggccattcagggcgaagctgcggcaatagctgtcgccggcaaaagtttcaattccctgcaccgtacgcgcgccaagaaaatgaaacatccattgccagtcgtagggggaatgccagggtagcagcgtcatcatttctccttttttagcgcttcaatcatagcggctccgcgccgcctgcgccttgcttttaaattccagttgtcgcagtgccgtcaatccgctaaagtcgccccccttcttcaccggcatggggattttgcaggctatgtttattggttttgactacggtaccgctaactgttcagtggcggtgatgcgcgacaatacgccgcagctgctgacgctggaaaacggcagttcactactgccatcaatgctttgcgcgccgacccgcgaagcggtcagcgagtggctctaccgccatcacgacgtcccgcccaacggtgatgaaaaccaggcgctgctgcgtcgcgcgataagcttcaaccgcgaggaagatatcgacgtactcggcaacagcgtgcagtttggtctcgcttcgctgcatcagtacgttgaagatccgcaagaagtctacttcgtaaagtcgccgaaatcgtttctcggcgccagcgggctcaagccgcagcaggtagcgctgtttgaagacttagtgtgcgccatgatgctgcatatcaaactccaggcgcaaacgcagctgccggaaaccatcgaccaggcggttatcggacggccgattaacttccaggggcttggcggcgatgatgccaacgcccaggcgcagggcattctcgaacgtgcggcaaagcgcgcgggctttcgcgacgtcgtgtttcagtttgagccggtcgccgccggtctggatttcgaagcgacgctgagtgaagaaaaacgcgtgctggtcgtcgatatcggcggcggtaccaccgactgttcgctgctgttgatggggccgcagtggcgggaaaaagccgatcgccagcaaagcctgctcggccacagcggctgccgcgtcggcggtaacgacctggatatcgccctggcctttaaatgcctgatgccgctgctggggatgggcggcgataccgaaaaaggcatcgcgctaccgattctgccgtggtggaatgcggtggccattaacgacgtgccggcgcagaccgacttttacagcgccgccaacggtcgcctgcttaacgatttgctgcgcagcgcccgcgatagcgaaaaagtcgcgctgctgctgaaggtctggcgtcagcgcctgagctatcgcctggtgcgcagcgcggaagagagtaaaatcgccctttccgcgcagccgagcgtcaacgcggggctgccgtttattagcgacgagctggcgacagccatcagccagcagggtctggaagctgcgctggatcagccgctggcccggatcatggagcaggttcagctggcgctggataacagtaatgaaaaaccggacgtgatttacctgaccggcggcagcgctcgatcgccgttgattaaaaaagcgctggcggcacacctgccgggtattccggttgccggaggcgatgattttggctcggttaccgccgggctggcccgctgggcgcaggtgatgtttcgttaaacatccgctgcgttcccgcaccacagaacgcagtgaatttgtagcccggctcagcgcagcgcgagccgggctaaatcttcccgattgccgtcacccttcacgccgcgaaacgtaatcccgccgcttttcgccggtataaatctgccgggggcgataaatattcagcggcgcttcgtgcatttcgttccagtgcgccacccagccaagcgttctgcctacggcggtaatcgccacaaacatcgatgaaggcagccccatcgctttaaggatcaccgcggtgtagaaatccacgctcggcgacaggccattttcaacaaagtaggggtcagtcagcgccacctcttcaagggccatcgccacctgtagcggcatatcggacatccccagttccttcagcacccggtgacaggtttcgcgcaaaatagcggcgcgcggatcaagatgacggtagcgagagttaccgaatcccagacgacgaaacgcctgcggatcgcgtttcgctttgctcagaaacgccggaatttggtcgacggtgttgatctcctccagcatccgcatactggcttcgttcgccccgccgtgggccggtccccataaagaagcgagcccggcggcaatgcaggcaaaaagattcgccccggaggagcccgccgcccggacggtggtcgtcgatgcgcactggccgtggtcggcgtgcagcaccaggatctggttcatcgcctgctcaatcaccggattcagctgatacggctccgccgggatagcaaacagcatatgcaggaaattccccgcgtaggaaagatcgttgcgcggatactgcgccggttgctcaatagaaaacttatagctcatcgccgccagcgtcggcattttcgacagcaggcgggtggcggccagcgcgcggtgctcaggattttcaacgtccagcacatcgtgatagaacgccgccagcgtgcccaccagagcgcacattaaggccatcggatgcgagtcgcgccgaaagctgctgcacatgcggccaatctgctcgtgtaccaggctatggcgggtaatcgtgtttttgaacgactgatagctggcttcgtcaggcgcatcgccccgcagcagaatccaggctacctcaaggaagtcgcactggcgagccagctgatcgaccggatagccgcggtgcagcaaaacgctgttttcggtatcaatccaggagatggccgacgtacagcctgcggtgttagcaaaaccggggtcgaaactgcatatacctgcggacgccagcggacgaatatccatgccgggatagccctgcgtccctgagaccgtactcaacggaatggactgttgttcatccaaagacagcgttagcgatttcgtcgtcatcctgtcaggtctccttgcacaacgagtgaatgatttacctggtcatttttccaggcggaataaccaacataaccacagtcgtccgcggattctttgatgtaaataaccaaaacattgataaaggaccgctattacgggtggggaagaaacagaaaatcgccctttcaaccgcataaaatacgcttaccccgaaattaccctcatctaaattctactatcacgccttagaatactgattttatttcatcacaggtcaatatataaccattttatttttttgcccgcataaatccgctactcgtacgcggtgccatggactgccggtgtcagttttttatcacacgctcgtcggcggtcttttatgagggtctgtgcgaccggtcatcccatcagccgcggtggattcatcgccaaatgcgcctcactcgccgcagatattgtccgttatcgttatttcagcgtaaattaaacttgaatataacccgctgcttttatatgcgctgattaaataatctaatgccaattttatatagctgtcgcgtcaatttatggcataacatcataaactcgtatgctgcgcctgaactttcaggttgcttattatgcacctcccccctactttaacgttgattgagaatcttcttacagcaggtctggccagttacccggcgtgcagataacgctggaataatatcttcggcaccagcagaatgctgcgttgcccggtcctggacgtttatttcccgaatgcggaggggtacctgtgcctgcggcagcgttcctctgcgtttataccgtctgattgattaatccatgccacaagggggcgtgattgaatcgtttgtgcgctttttatgatcttattcgcaggagccgcagcgcgcatttctgggcatggtgcggcgtcattatcgctctgcagataggggtgccagcccgcgcggaggtccgccagctgggtattgatattccggtctactggtacgccgacgccagcgacacgctgaccctcaacgcctttctttcactccctgaagaggtgctaaaaacggcgccgcttatcccgtcgttcggctactcgacaaaggcctactggctacgtacttcgctcccggcggccttatttgctggcgaacagcgctggctgcagctcggtccgtcgtttgtcgatcgtttgaccgtgttttatcgcccctacggcagcgacagtccatggcgacagaaagagtttggcgaccatgcgtctgcccgggataacgatctcgactaccgcgaaagcgttctgattttgccgcccccgccgacggcggctggctacgagatggtattccgtctccagagcagcagcaccctgattctgctggcgacgctctcctcgccgcaggagttcgtgcgttcggccacgctcgataccgctttctggagcttctattttggcctggcggtaattgccagcggcatcgccctgtggcttgccatcgcgctgcgtcggcgcctgctgtgggggatctgcctgttctcgctaaactatccgctcgtcgcggccctgcatggctacccggagtggttatttggcagcgccctgctgccggttcaggattatatgatcagctgcctgtcgctagtgagctacgccaccgcgctgtggctgcatagcgaagttttcgatctcaagaaaaatatgccgcggctgcatcaactgctgctggcggcgatcggtttaaacatcgttctgcaaatcagtattccgctgggcttttacggcctggcgatgcagatagaggccgggatattttttatcgccgcccctattctgttaatcacgtcatggatgctgtggcggcgcaaagcgattgatatcaatacgctgctgctggggctgctgccgccgatatatgtcgtctccgccgggctggcactgctctctatccacggcgtcattccgtttcataatggggtctattccacctggcagtacgcgctgattattcatatcgtcaccgtcctgatcatcgccgtactgcgggtgcgggcggaaaaccggactctggtacgcaagcagcagctggcgcgagagctacagattgaacgcgaggccagcttccaccagcgccagtttatgggaatggtggcgcatgagttcagaacgccgctggcgatcctccaggccgcgctggaaaacctgcgcctgtgccccgcaacggtgacgcagagctcgcgcctcgaccgcatgcagcgggcgacaacccgtctggtacagcttaccgataattgcctggccgacgcccggctctcctccagggacctgcacgccgacaggcaggatgcagcgctgctgcccgtgatctatatggccgcgacggtcgtggatctttcgcttaaccattatctggatgtcacccttgaggggcaaactgtgggtccggactccccttcaccggtgctgtttattgatagcgggctactgtgtatcgccatcgccaacctgctcgacaactcggtgaaatatgccgcctccggggagataagcatcgagatttatccgcaggaaaaacacgtggaattacgcattggcgatcgcggtcccggcatcccgcctgaacaggtcgaacatattttcgagcgctatcggcgcggcgaaacggataccgcaacgccggccgggaccgggcttggcctgtatgtcgcccgacaaatcatccaggctcacggcggggacctgtggctggcagagaacacgtcggccggatgcaaatttgcgctcacgctcccggttaacggacagcagaaggacacatcatgacattacgcgtcgcaatcatcgaagatagcgctgatttactcgacgagctgctggcttttctgcgccatcgcggcttcgatgcctggggcgtgcgcagcgccgaagccttctggcggcagctgcatcgcgatccggttgatattgtgcttatcgatattggcttgccgggtgaggacggctttagcgtgctggactatttgcacgaaattggccagttcggcctggtggtggtgaccgccagagggcatgagcaggatcggctccaggccttaaacgccggcgccgatctctatctcatcaagccggtcaacttttccgacctagcggagagtattcaggcgcttggctcccggcttcgccagcaaaaaccgacggaacgcgtcaacccgccgccatcagcagagcggccagcgccgtctcactgggtgctccagaacgagcaccttgtggcgccgtctgggctggccctgccgctcacgcagcaagagtaccgactgctggaagtgttaatgcgtaaccgcaatgaggtctgcagcaaggttgacctgcacacctctctgtttaccgatgaaggcgaaccggaactgcaccgaatcgacgtcgtgatcagccgcctgcgccacaaggcccgccttcacggtatcaccctgccgattcgcgcgatttttggcaaagggctggcgtttctctcctgacctttccccggccggcagcagcagcgctgccggtcagtattccgccatccgcgcggcgtcattgcgaagttgttttcagttttgctcctcttgttaatttttttcagtttttgagaggaatgagagaaatgagactgacagcacattaagaattttcttacattgacatggtgtcgtgagcgtaccggcccaaagcgtccctgagcgaaccgactattgctgatccagcgatagctgaattcaggacgcttgccgcgcgcttttcgtacgcgtatcgcgagcacggtttaaagaagagtataaaaatattcccgtgccggcgaggtacatttttaacacctaaaattaagttaaaggatatctatcatggccatgcaaacatggttagccttattgctgtgcatattttgcctttgcgtgtctgtttacagccttgtttcctatatcagagacaggagaaaacaaaaatttccgttttcaactaagaattcatcgcgcagaaaataactaaagccccgcgaataataaccaaatctgtccagcagcagccaccgcatacgcccggaggattgatcacaacatggcgttatgttgatttatcagggaaataacgccatgaaaaaaataaacatcgctatcaacaccaggaatacttttctccgagagtcgttggttgccatagtcaatgagctcatcagccgcagcggcaaccttaaagccgctttttcttataagcataatgattttttagataaggatatcatcatcgctgaagttcttcccggcgagatctatctgtgcaataccagtattaagaaccgtaaaaaaacagttcggtgattatattacacagctatgacaaacttccggaaaaggagctgatcgtcaactgccttaagggcgttacctttgtctcaatcaaagccgttaatatcgataagatgtttgaaattattgcccacgagctgaaaagaagtgaactgcttcctctgacgcagaagatcgactcgccgctaatttgcacaaactgcccgcataagatgttgtccaaatcgcaggtagccgtcgccaccggcattattcatggctttgatatcggtaaaatttctgctctcaacaaagtcactcccaaaaccatcacctggcacaaaagcaaaattatggaaaaatacagccttaataacaattatgactttttccagtttattaacttattaaaagaacgctggtaaacgcgcgcacgcgccatcgacgatcggattatgtaccgtaaaattaagaatttgctggcttgcgaggaacgggattccgaaaaagatcggtaaaatgaaaaacatctactcaggcgttacgggcagcgggtaacatgacccggttccctggtatgaaaataccggagcgtatttttatacaataaaaaatgcctctaccagggaatctgttacttcgtcacattgcccctggcgtgcctgtcaggggcctctttttctgcgcaaaaagcgaccccgtcagagaggccgcccgacgatcaggcttgcgcctgctgagacgcgacttcagcctcgggtacctcattctgcgacagaccttcattttttgacagcatcgccgtcgcaatcccgttacccagcacgttaatcgctgaacgccccatatcgaggaaatggtcaatccccatcagcagcaaaatacccgccaccggaatattgaagctcgggatggtcgccgccagcaccaccagcgccgaacgcggtaccccggcaatccctttcgaagccagcatcagcgtcagcatcattacggtaatctcgctaaagctcagctgaatattgtaagcctgggcgataaacatggcggcaaaagagcagtacaccattgaaccgaccagattaaaggagtagccaattggcagcacaaacgacgcgatattacgcgagcagccaaattccaccagacgctccagggtcttcggataggcagcctcggagctgctggtcgtgaacgccaccagcaccggatctttgagcatattcagcaggcgaaaaacctcttttttgagcaccatataccccaccgccagcagcaccgcgctggtcagcagaatcgcgacatagtatccgccgataaacgaggcgtaattaagcaggatccccagcccctgcgaggcgataaccgaagagatcgcggcgaaaatggccagcggcgcgacgtacatcacgtacccggtcaccttcagcataatatgggaaaccacgttcagcgccgccaccagcggggcgttgaatttctcccccagcgatgccccggctataccgaagaacatagagaagaccacgatttgcagaatctcgttgttggacatcgcctcggtaatgctggtggggatggtatgggtcagaaagcctttcaggctcatcccactcaccgccagcccggtatccacggactctttcgggatcgccaggttcaaaccggcgccgggatgctcgagggtaacaatcaccagcccgaccagaatggagagaatggacgaggtaataaaccacaccatggctttaccgccgacccgcccaatggtcgccgtttcgcccagccgcataatccccaccgtcagggtactgaacaccaacggcgcaatgaccatcttaatcaggcgcagaaacacgtcggtaagcagcgtaatgttttccgaccatgcggtaatagtcgtttgcccggcgtaagcgtggatggccgcgccggagaggatccccaacagcatgaagatgacgatgaacagcgtgagtttgtttgcacttgccacaaaaattaacccctgatttatttaacgtgttgttttttaatgtatatatgttttatttattggaatacattaaacattcaccacataaattgaataaaagcaggcggggttacaactcttttttagtttttatagtaaaagttaatgtgctcgttgatgtgcatcaaaccgtgccgcgccgccggtaagatgaaaaaggcgccggcgtcagaagacaaccggcgcaaagaggcattagtgttttacggtatcctccaggaagaaacgtcccagcggattctgataaaaaccatcgatatttttgcggctgacgttgcggtacgggctgtaatacagatcgacccagttcacgtcggccttggccattttttgcaggtcgatatacatctgctcgcgctttttactgtccatttcaacgcgcgcggcggccaccagcgctttaacctggtcgttatgatagcgggtcatatagttcatattggcatcgtgacccagcacgaaggtggttttctgatcggggtcgagaatatcgttggtccagtacatcaccgatatatcgtactccccggccaccagcatatcccagctctggctcgggtcgactttttgcaaattcaccgtcaccccggcttttgccagctgctgttgtagcaaaatggcaatttgctcatcgacttcatccccggcattgaccacatagttcagcttcaggtcggcagcacccgccgctttcagcatcgctttggccttttgcggatcgtatggccggcgaagattatcctgatagtggtaaagcgctccggcgggaatataggaattggccacctgaccgtagccaaaggtcacggtttttacaatcgcgtctttatcaatcgcgaagtccagcgcctgacggacttccaccttgcccagcgcgccgtgagaatgattgatcagcagatggtcctcgcgagtagaaggatccagctccaccttcagattggcatccttttgtaacgatgcaatgcgcgagaaaggcacggtcagcgcggcgtcaagttcgccggcctgcactttcagcatgcgggtattgtcgtccggaatggttaaccactccacgccatccaggctgacgtttttcgcctgccagaagttcgggttcttcaccagcacgatcttttctccgcgcagccactctttcacgctaaacgcgccggagcccacgggcttttcggcaaacgcctcttcgccttccgccttcatcgcctgctgggaaatcaccgaagcgttcggcagcgccagctgcgataagaacggcgctgaaggcgatttcagcgtcaccaccagcgtgcgcgggtccgtggcttccgctttggcaataatgctataggaatcccgccacagcgagccttcatcatcgcggatacggatcaggctaaacgccgcatcgctggcggtcagcggcgtaccgtccgagaaccgggttgcgcgaattttgaaggtatagactttgccatccggtgaaatcgtccagctctcggccacgcccggctccagcttcgtcccgcttttatccacccgcaccagcgggtcaaagacgttggaaaagacccagttatccgcattttgcgccgattttatcgggtcaaacgtggtgctgtcctcccggcggccaatggtcaatacgccggccgcctgagctatttcactcaccacgctgagcgccagaaaaacgctcgccgccagtaacttaatctgcctgtgcttcatcaaaagatcccccagttaacggaaaaacggtctcatcgcccgcgaggttgagcacgcaggcataagcgcgatcggcaatctgccgggttggtggtggtgcgccggtgcggcactgcacctgcgcataagggcagcgcggatgaaatgcacagccttgtggaacggctacgggactgggcggctcgccccccagcaaatttttcggcagcggtttatccgggtcgatttccgggatcgccgagaccagcgcggcggtatagggatgcagcggtcgagtgaagaccgcttctgccggcccctcttccacaattctcccaagatacatcaccgcaacgcgatcgcagagccgccgcacaatcgccagatcgtgggcgataaacagaatcgccagccccatcttttcccgcagatccatcagcaggttgacgatctgtccctgaatagagacgtccagcgccgcgacgcactcatcggccacgatcagccgcggctccatggccagcgctctggcaataccgacgcgctggcactggccgccgcttagctgagacggtttcgcgctggcctgctgcggacgcaggccgaccagggtgagcagttccgcaacccgcagcgcttcctgcccgcgcgggactttctgatgcacgcgcagcacctcggagatgctttctcctacggtctgccggggattcaacgaggcatagggatcctggaaaatcatcgcgctttgctggcgcagacgggcaatatcgctggttaagccatgggtaatgcgctgtccggcgaaccgcacctcgccatcggcaacccgttcaagctgtaacagcgctcggccaagcgtgctcttaccgctgccggattcgccgacaaggcccagcgtctcgccaggaaagatctgcatcgtgacccggtttaccgcgtgtacgacccgcttcggccgccaaaggccgccggaaaccgggaaggtgacgcaaagattatcggcctcaagcagcggccagcgagcgttaaccattatccctcctgccgtgctggcaaaatgtgatggcaggccaccgcgtggctatggcaatcctgcccgtaacgcagcaatggctggctctgacacgcctcatcggcgcggcggcagcgcgggtgaaagcgacaccctgatgggaagtggtcggcgctgggcggctggccgtcgatgatcgtcaacctcccctgcccgccttcgctggccggctgacaatcaatgagcccgcgggtgtagggatgcaggggcccgccaagcacttcgcgtttgccgcccacttcacacagcctgccgccgtacatcaccgcaatccggtcgcaggtttgcgccaccaccccgagatcgtgggtgatcataatgaccgccagccccagctcggcgcgcagatcgctgagcaggcgcagaatctgcatctgcacggtgacatccagcgcggtggtcggttcgtcagcaatcagcagccggggttccggcgcgagggcaacggcgatcatcgccctctggcgcatgccgccggaaaattcgtgcggatagctattgagccgattctgcgggtccgggataccgacctggcgcagcaaggccagcgcatcctcccgcgcctgacggcggtttgccgcaaagtgaaggcggcgactttctgcaatctgctctccaatggtcatcaccggattgagatggctggtcgggttctggaaaatcatgccgatttcccggccgcgcaccgccgacatttgcccttcgctgagggacaagatatcccggccgtccagcagaacctcaccgccggtaatccgcagtccggcccccggcagcaggcgcatcagcgcccggcaggtcacggttttccccgacccgctttcgccaaccagcccaagcatctccccggcttcaagcgttaacgagacgttatccaccagcgcgacatcctcgccgcgcatgaccgtcagctgatttaccttcagcaagctcatacgcgttcccctagcttatcgcccagcccatcggccagcaggctgaagcccatcgccagcagcacgatggcaagccccggaaaggtggttatccaccatgcggtggtgataaagctctgcccttcggccaccataatcccccattcggcggtaggaggctgcacgccgagcccgagatagctcaccgaggccccgttcagcagcaccagaacgcagtcagacatcgaaaaaattatggctccggttagcgcattgggcagcagatggcggaacaaaatccgcagatggccgtagcccagactgcgggccgccagaataaaatcgcgctgtttcagcgtcagtacctgagcgcgtaccagccgggcgtaggagacccagcccaccatcgccatcgccatataaaagctgctcagccccggcccgaggatggcgataatcgccagcatcagcaccagaaacggaaaggccagcacgatatcaataacccgcatcaccagcgcgtcggccacgccgccgagatagcccgccagcgcccccagggtggtgccgagcataaaggggaacaggacccccagcaggcagatttgcagatcgacccgcgccccccacagcacgcgggaaaaaacgtcgcggccaaagttgtcggtaccgaagagatgcgcgccgcccggcggcagcaggctggaagaggcgtcctggacaataggatcgaacggcgctatccacggcgccagacaggcgaccagtagccatagtccgactatcgccagcccggcgaagagcgcctgctgacgcgggatcgcccgctgacgcaggcgggaaaaggtcgctatcgccttcatagttttatccttgggtcgagggccacggtcagaatatccgccagcaggctgaccgccacggtggcaagggcaaagaccattaccacgccctgcaccaccatgtagtcgcggctaaaaatcgccttaaccagcagctgtccgaggccggggatagcaaacacgctttcaatcaccaccgtactgcctataagccagccaatattcaccgccagcagattgatggtcggcaccagcgagttcggcagcacgtgccgccagaagatacgtctttcctgctgcccgcgcgcccgggccgccaccacatagtcgctattcatctccatcagcaggctggcgcgcaggttgcgaatcaataccgccgacagcgccagcgccacggtcaggcacggcaaaaccatatggtgcagctggtctaaaaaatcgctgccgtagccggagaccggaaaccagccgagcacgatactgaacagcagaatcagcatgatgccgagccagaacgccgggaatccgagcccggcggtcgtaaacagacgaatcaaccgatcggcgagacgcccgcgctggcgtgcggctatcgccgccagcggcaccgtcaacgctactgccagcagaacgctgccgagcaccagccacagcgtcggttccagccgcgaggcaatcagcttcagggtatccacccggtatacaatcgacttccccagctcgccctgcagcaggttgcgcagaaaatagccgtactgaacccacagcggttcatcgagggcaaactgcgcgcgaatgcgggccagcgccgccggcgtgctgcgcacccccagcagaatacgcgccggatcgccggggatcgcgcgcaccatcatgaaggtgatcaggctgatacccagcagaaccggcagcagctgtagcgggcgaaaaagcagaaagcggtaacgatgcattaacagcctcccgcgtcgcgctggcgtgccagaaaatcgagcagcaccgggtagtaagcctgcggctcttcgtaaaacggcatatggctgctgttggcaaaaatggctatttcagcgttcgccaggccctgcttcattttcagggcgcaggcgggcgtcagttcatcgtgctggccgctggtgatcaaacagggcacgcggattgacgccagctcagcgctgcggttccagttttttaaattaccggtatagaggaattcgttcggcccctgcatggtgatatacgggcccatattccagtccccaagcgagcgggtaaccggctctggccagacgtcaagacggcacacgtgacggtaattcagcagcgtaatcgccgcctgataggctgggtggtctagccagccgagcgcttcgtagcgctgcatcatcgcgacggtttctggccccagcgccccgcgcagacggttcagctcctgcaccagatgcggcatatcggcgacggtgttttcaagaatcagcgagcgaattgcgccaggatggtgcaatgccacttcaatcgccagccatccgccccacgagtgaccaagcagatgcacctgaccaaggcccaaagtccggcggacggtctccacttcacgcacatagcgcgccatcgtccacaggctggcgtcatccggccggtcggactttccggtccccaactggtcaaaggcgatcacccgatagccgtgctgtttcaggcaggcgtgggcttcgcgcagatagtcgcagggcagccccggtccgccgttgaggcagagaacggtctcatcgccgtcgccaaactgataggccacgacgttatagccttccaccgcaatgttatggcaccggtcgggcgctatttcgctccacatggtctattcctcatcgtcgatggtaagagggttggggtctgtcttaacgctaacggcaaccccggacgctgaacagttagcaaaaatactagttttgcgctgcgccgggacggcaccggaattgcatatctttgggccagctactgacggatttgcacaaatcgtgcccgtcgcaggtctcgttttaggtgaagggggttatatgcgactggagtttgaccaccccggcagcgcgcgggcggccagcctggatgacgcattcagcgggctttttcagcacacccggaggttgggatttgaggcggtgatttacgattacacgccggttccgcgttctctggaaggagaactgattacgccctcgctgctgaaaacgttcaacgtgccggaagatatgcgccagctatggtgcgagcgcggatattaccaggtggatccggtacagcactgcgcgctcgagagctgcgcgccttttgtctggtcctatcaacggccggacagcagcatgctgcgcgggaggctggacaatcatcccaccgcggtcaccgactatatgcgcgaacacaatatgccctgcggcgcgacggttcccctgcatctccccaacgggggattcgtgaccctcaccggcatccataccggccagcgccaggagcgggaaatcagcgccaccctggcgcagctgatgctgctcgcctggcagtttcaggagtccgccttcccgctgttcgacagcactatgctcacctgccatcacgtcaagctgagcaaccgcgagcgcgaatgcctggcgtggtccgccgaggggcttaccgccaaagagatcgcccgcaagctgcatcgctcggtggcgacggtgacgctgcatctcaataccgcggccaaaaagctgggcgccagcaaccgcgtgcaggcggtggtccgcgccctgcactaccgtctgctcgacagctaagaactagcatttttgctagtgttcagccgcggttgccagcctttaccctgaaagccggtccacttagcagggtaaagatgattcatgtataccatccgcgaaggttacgccccgtttcggcactatcaaacctggtttcgcgtttgcggcgatatcgatagcggactcacgccgctggtcgtcgcccacggcgggccggggtgcacgcatgattacgtcgatgcgttccgcgatatcgccctcagcgggcgagcggtgatccactacgatcagttaggcaacgggcgttcaacccatttaccgcagcagcccgccgacttctggcaaccggcgctgtttcttgacgaactggctaacctgctgctgcatctcaatattgccgataattacgccctgctcggccaatcttggggaggtatgctcggcgcggagcacgccgtgacgcagccaaaggggttaaaggcgctgattatcgccaactccccggcatcgatggcgctgtggctgcagggtgcggcaaagctgcgggcgcagctgcccgccgacgtccagcagacgctgctggaccatgaggcggcgggaacgctggacagcgcggaatataaggcggcaagcgcagtattttatcaacgccacgtctgtcggctcgatccctggccggcggaagtgcggcgcaccttcgacgccatggatgccgacccgacggtttatcacgccatgaatggccccaccgaattccacgttatcggcagcatgaaagcgtggacgattatcgaccgcctcgcgcgcattacggttccggttctgctgctttccgggcgctacgatgaagccacgccggaagtggtacagccctttatggaccatatctccggcgccgagtgggtcatttttgaagcctcgagccatatgccgcacgtcgaagagcgcgagctgtgcatgaagacggtgaacgactttttaggccgggcgataccataaaagccgcttacagcgccagtccgcctccgccactgaagggccgctcgccggcgattttcatcacttcagcccctaaagtgacaaacggcgcccgacggctggcataaatcaggccgcccgatgtcggccgcaccgctttgaccatatcggtcagcggatcgatgatttccgcgacgacatcgtcagcgctgacccactcgccgggctgttttagctgcaccaggatgccggtcgccggcgcggtgacaatctccccggcggcaaacggcagcatcaccgtttcctgctgcggaacctcgggcctggcgcccgccagcacgccgcggtactgcaggtaacggtaaatgcgttcggcgtcgtcgcaggcggtggcgtgattcacctcctgctggccgcgcagctcgacggtcaccgccatgcagccgggctgctgctggcgccacgacggattcctcgcgcaaagacgctgccacggcaggccgcaggcttcatcaaacgagttgcccccgctctcctgcgacagcagcacggcgccaataccgaggaaagccgccagaactttcgcctcgcgttgccaggccgggtcggcgtagaggtgcaaaatcgcctggtcatcgcagtgcagatcgagcaccagatcggcatcgcaggcgaggctcagcagatggtggcgcagggcctgcgcctcgctcacggcgggaagcgccgccagcgcctcccgcatcgccgcgcgcacccgctgcagatactcggggcgcgtaccgggcaaatccgccggtaaaccggcctgcgccagcgccgccagatcgggaaaatcgcggttaaaattgcgcccgctcgccagatcgaaacggccaataccgctgctgagcagcacctgggccagccccggcgggttggctaccggcacaagaatgatttcgccgcgcagttcgccgcgccgttccgcctggctgagtaatcttttaagataatgcagaaccagcatgcccgggatttcatcggcgtgcagccccgcctgcagatagaccttctctcccgtgccgggcgcgccgaaatgaaaatggcttaattgccgctgcccaccgagtgcatgttcaggtaatgtatagtgtttaattttcattggacgtcctggttgtggaaaagaaagcccggcttgaccgtatcgatcataagatccttgaaattctgcgccgggatggccgcatttcttatcagaagctctcggagcaggtaaacctcaccgcccgtccatgcctggagcgggtgcgcggcctcgagcgcgacggcattattcgcggctacagcgccattgtagaactgcccgagccggagcacgcgtttgtggtacaggcgcaaatcgcgctggccgaccacgggcgctcgcagccgatgtttgagcaggagatgcgccagacgcccgaagtgctggactgctggctggtcagcggcagcttcgactttctggtacgcatcggctgccgcagcatggcgcactactgccagctggcggatagctggctgaccagtaaaaagtttcacgtcgataaaatcgtcaccctgaccgaactgcaggccattaagcgctcctgactagccgcgccggataaacgccagccagcgccgctcggcgcgggaaaaggcgaaaatcagcataaaggtgcagagcagatacagcgccgcggccatcagaaacggaataaacggcgaataggtcatggcgtagaacgcgcgggccacgccggtaatatccagcagggtgacggtgctggccagcgacgtggcgtgcagtaaaaagaccatttcattattcagcgccgggatcccgcgtctgagcgtcgcaggcagcaccagacgacgaataatctgccatttccccatcccgtaggcctccccggcgacccactcctggcgcggaaaggtcaccatcatccccgccaggagctccgcgacgtacgcggcagtgttgaggaccagcgccagcgtggcgcagaaggtcgcatcgcggaacaacagccagaacggctggtcgttcatccagcccgtctgcacgatatcgaactgcgacaggccgtagtaaatcagcatcagctggagatagagcggcgtgctgcggaaaaaatacgtaaaaccacggatgggcagcgccagcgcgcgcggtccatacacctgccccaccgccatcgctatcgccagcgccatcccgggaacgatggagagcaaaaacagctccgccgtgaccgccagcccgctggcggcgccgttgccgtcgctccacaaaaagctcgggatcgcatcgagaaaggtttgcagattcataaggccgtccccgccgtggaagagcgcagcgcgtaacgcttcgccaggcggctgaaaagccagctggagagtgcggtaatcaccatgtaaatcagcgagaccagaaaatagaagaggaacggcttttgcgtggcgcgcccggcctgttcggccagccataccatatcctcaaggcccaggatcgacaccagcgccgatgctttcatcagccccagccagttgttgttgatgcccgggatcgcgaagctcagcatctgcggcagcatcacccggcggaacaccgtccacggccgcatcccgtaggcctgcgcagcttcggtttgcccgcgatcgacggtcagaaaggcgccgcgaaaggtctcggtgtaataggcgccgaaaacaaagccgatcgccagcacgccggagataaaggtattgaagcgcaccggcccgagccccaccagacccagcagcaggttcaccagcatctcgccgccgaaaaacagcagcagcataatcaccagctccgggataccgcgcaccagcgtggtgtaggcggtggaaaacaggcgcagccacggcgggccaaagagcttaaccagcgagttaatcagccccagcagcagagcgaccagtaatgaagagagcatcacgcacagcgaaagcgccgcgccgcgtaacaacaggggtaaatagtctgcgaccatattcagccttccgcggaggtcgtaaaggggcgcaggccatcacccgcgcccgcatcttcacgacttatttgccataaatatcaaagctaaagtattttttctggatcgcgtcgtaggtgccgtcggtgcggattgccttaatggccccgttcagcgcatcgcgcagcgccgggttgtctttattcaccgcaatccccacgtcggaagagatgccgccgtcctggataaccggaccggcaaaggcgaatttctgcccgcgcggggtatcaataaagccggtcgccgcctgaatattatcctgcaacgcggcgtcgattcgcccggagagcaggtcgaggtagacgttatcctggttagcgtaaccgacaatcttcacgccatgattggcccagttggccttcgcaaacgcttcatgggtggagccggtctggacgccgacggttttgcctttcaggctggcgacgtcaggcatcagcgggctgcctttgcgcgccaccagctgcgccgcgctgcggtagtagcggtcggtgaaatccacttcctttttacgctcatcggtaatattgagcgaagcgataatggcatcgaacttatgcgcgttgagggcggcaatcatgctttcgaacggctgcttcacgaaaacgcatttggcttttagctgggtgcacagcgcattggcgatatcaatatcaaagccggtaatttcaccgctgggcgccagcacgtcaaacggcggatagccgccatcgacgccaaagctgatggtgtcaaactgctgggcggccagcggcgcgctgagcgccatgcaggccagtagtgcggcaaggcgtattttcatttcgatctccccggtgttggcgcggtgattaaaaacgcagtgagaggcaggtcaggccgccatccattttcttaaattcgctggtgtcgagctgcacgataggcattcccagcttgctgatttcgcccagggtataggggtagccctgcggcgtaattaaggtatcgttgatccacagcgtatttccggcgtaggcctcctcttccgggatcacgatgctgttgaagccgctaaacgccggatggctaacgtagccttccgtcagcagcagcgtattgcggcccacatagttgacgatcgatttcagatgcagaccggcgctcacttcaatcgccgcgacctgatagccgtgcggctcaacggcggcggcaaactcgcggatcccctgctcatcggtgcgcgccgtcaggccgataaaaaactgcttatccactaacagcacgtcgccgccgtccatatgcccgcgctcgctcattcgcgccagcggacggaaccccgccagcaccggcgcaatggtatcgacctcgccctgacggctcggcgcgcccggatgggtgatcaccgccagttccggcatcaccaccgcggtatcttcaacaaagtgcgcatcaggataatccgccgccgcgggcagtacggtgaccttcaggccaagctgcagcagggtttctacataggagagaaactggcgggtggtggcggcgatatccggcgcgcccagccgggcggtagtttgtcctgcgccgcaggtggcggccgggagacgggcgatagcttgggtaaaatgcataaagaaccctctggtagtggtcgcattgcttaaggcaaaatcgtgagtgaatttgattatcaaacagatgccgccgccaatcaggctgaatcactttccggagccgcttattcacgctgtatatcagttcagattcgacgtattccgctgtgacccttaagaaacagcggatgacgggcaataactaaccgggttcatcgcccggctaagcaaaatcgttaagcgaatattacgcctaactattcaccgtaaccggctctgcgaaaagcattttttacagacatatctggacagtcttttcataattcctccatttttaagcagcgttcgctggctaaactagtatcattccgtgaaacgtttcaggatgagatagcaaattaatgaaaggtagcaataaaagccgttgggctgcggtgctggtggtcgcgatcgtcgcgggcgccgcgtactggttctggcagggtcgcgaagcggcaaacagcggcgcgccgacggcatcaggcgcgcgtcagcaggggcccggaggcggacgccccggtcgttttggcgccgccctcgcgccggtacaggcggccaccgccaccagcgaagcggtaccccgctacctttccggcctcggcaccgtgacggcggcgaataccgtcaccgtccgcagccgcgtcgacggccagctgctggccatccactttaccgaaggccagcaggtcaaagcgggcgatctgctcgcggaaatcgaccccagccagtttaaagttgccctcgcccaggccgaaggccagctggccaaagatcgggcgaccctcgccaacgcccgtcgcgatctggcgcgctaccagcagctggtcaaaaccaatctggtttcccggcaggagctggacacccagcagtcgctggtcagcgaaacccagggtacgatcaaagcggacgaagccgccgtcgccagcgcccagctgcagctggactggagccgcatcaccgcgccaatcgacggccgggtcggcttaaaacaggtggatatcggcaaccagatcgccagcggcgacaccaccgggattgtggtgctgacgcaaacccaccctatcgacgtggtctttacgctgccggaaaaccaaatcgccaccgtagtacaggcgcagaaggcgggaaaaaagctggctgtcgaagcctgggaccgcaccaataaacagaaaatcagcgaaggctcactgctgagcctcgataaccagattgacgccaccaccggcaccatcaagctgaaagcgcgctttactaacctggacgatgccctgttcccgaatcagttcgtcaacgcccgtatgctggtcgataccgagcagaacgcggtggtgatcccaaccgccgcgctgcaaatgggtaacgaaggccatttcgtctgggtactgaacgatgagaacaaggtcagcaagcacaccgtcacgccgggtattcaggacagcctgaaagtggtgatcaacgccgggctttccgccggcgatcgcgtcgtaaccgacggtatcgaccgtctgaccgaaggcgcgaaggttgaggtggtggaagcccacgatgcggctaccgccgccgagccggaaaaagccaccagccgcgagtacggtaaaaaaggagcgcgctcctgatgcaagtgttaccgccgagcagcacgggtggcccttcccgtctgtttatcatgcgcccggtcgccacgacgctgttaatggtggccattatgctggccgggattatcggctatcgtttcctgccggtttcggcgctgccggaagtggactacccgacgattcaggtggtaaccctctatcccggcgccagcccggacgtgatgacctcgtcggtgaccgccccgctggagcgccagtttggccagatgtccggcctcaagcagatgtcctcccagagctccggcggcgcgtcggtggtgacgctccagttccagctcacgctgccgctggacgtcgcggagcaggaagtgcaggcggccatcaacgccgccaccaacctgctgccttcggacctgcctaacccgccggtctacagtaaggtgaaccccgccgatccgccgattatgaccctcgcggtcacctcttccgccgtgccgatgacccaggtcgaggatatggtggagacccgcgtggcgcagaaaatctcccaggtttccggcgtcgggctggtcaccctcgcgggcggccagcgcccggcggtacgcgtcaagctcaacgcccaggccatcgccgccctcgggctgaccagcgaaacggtgcgcaccgcgataaccagcgccaacgtcaactcggcgaaggggagccttgacggcccgtcgcgggcggtgaccctctccgccaacgatcagatgcagtcggcggaagattaccgccggctgattatcgcttatcagaacggcgcgccgattcgcctcggcgacgtcgccaccgtggaacagggcgcggaaaacagctggcttggggcatgggccaacaatcagcgggcgatcgtcatgaacgtccagcgccagccgggggccaacattatctcgaccgccgacagcatccgccagatgctgccgcagctcaccgaaagcctgccgaaatcggttaaagtacaggtactttccgaccgaaccaccaatatccgcgcctcggttagcgatacccagttcgagctgatgctggccatcgccctggtggtgatgattatctacgtctttctgcgcaacgtcccggcgacgattattcccggcatcgccgtaccgctatcgctggtcggcacctttgcggtgatggtatttctcgatttttcaattaacaacctgacgctgatggccctgaccatcgccaccggctttgtggtcgatgacgccatcgtggtgattgaaaacatctcgcgctatatcgagaaaggcgaaaagccgctggccgccgccctgaaaggggccggagagattggctttaccattatctcgctgaccttctcgctgattgcggtgctgatcccgctgctgtttatgggcgatatcgtgggccgtctgttccgcgagttcgccattaccctggcggtggcgatcctgatttccgcggtggtgtcgctgaccctgacgccgatgatgtgcgcccgcatgctgagccacgagtctctgcgcaagcagaaccgcttctcgcgcgccagcgagcgtttctttgagcgggtgattgccgtctatggccgctggctgagccgggtgctgaatcatccgtggctgaccctgagcgtggccctcggtacgctggtgctgtcgattatgctgtgggtgtttattccgaagggcttcttcccgattcaggacaacggcattatccaggggacgctgcaggcgccgcagtcggcgtcgttcgccaacatggccgagcgccagcagcaggtgtcggcagcgatactcaacgatccggcggtggaaagcctgacctcctacgtcggcgtcgacggtaccaacccggcgctcaacagcgcccgcctgcaaatcaaccttaagccgctggacgagcgcgacgatcgcgtgcagacggtgatcgcccgcctgcagaacgcggtgagcggcatccccggcattgagctttacctccagccgacgcaggatctgaccattgacaccaccgtcagccgcacccagtatcagttcaccctgcaggccaactcgctggacgcgctcagcaactgggtcccgcagctgctggcccggctgcaggcgctgccgcagctctccgacgtcagcagcgactggcaggataagggcctggcggcgtatatcaacgttgaccgcgatagcgccagccgtctcggcatcagcatggcggacgtggataacgcgctgtataacgccttcggtcagcgcttaatctccaccatttatacccaggcgaatcagtaccgcgtggtgctggagcatgatacccaggccacgccggggctggcggcgctggataatattcgcctgaccagcagcgacggcgggattgtgccgctgaaatccatcgccagcgtcgaggagcgctttgccccgctatccataaaccatctcgatcagttcccggttaccaccatctcgtttaacgtgccggacaactattcgctgggcgatgcggtcgaagcgattcttggcgccgagcaggcgctggaattcccgagcgatatccgtacccagttccagggcagctctctggccttccagtcggcgctcggcagcaccgtctggctggtggttgccgcggtggtggcgatgtatatcgtcctcggggtgctgtatgaaagctttattcatccgataacgattctctccaccctgccgacggcgggcgtcggcgcgctgctggcgctatggctggcggggagcgaactggacgttatcgcgattatcggcatcattctgctgatcggcatcgtcaagaaaaacgccatcatgatgatcgacttcgcgctggccgccgaacgcgagcagggcatgccgccgcgcgaggcgatctaccaggcctgcctgctgcgcttccgcccgatcctgatgaccaccctcgccgccctgctgggcgcactgccgctgatgctcagtaccggcgtcggcgcggagctgcggcgtccgctggggattggcatggtcggcggtctgatgctcagccaggtgctgacgctgttcacgactccggttatctatctgctgttcgaccggctgtcgctgtatataaagagccggttcccgcggcgtgaggaggaggcgtaggtgaagtttttcgccctcttcatttaccgtccggtggcgacgattctgatttcgctcgccatcaccctgtgcggcatcctcggtttccgcctgctgccggtggcgccgctgccgcaggtggatttcccggtcatcatggtcagcgcctcgctgcccggcgcgtcgccggagaccatggcctcttcggtggcgacgccgctggagcgctctttggggcggattgccggggtcaatgagatgacctcctccagctcgctcggcagtacgcgcatcattcttgagttcaactttgaccgcgatatcaacggcgcggcccgcgacgtgcaggcggcgattaacgccgcgcaaagcctgctgccgagcggcatgccgagccgtccgacctaccgcaaagccaacccgtcagacgcgccgatcatgatcctcaccctcacctcggatacctggtcccagggtgaactgtacgacttcgcctctacccagctggcgcagaccattgcccagattgacggcgtcggcgacgtggacgtcggcggcagttcgctgcccgcggtgcgcgtcgacctcaacccgcaggcgctgtttaaccagggcgtatcgctggacgcggtgcgcaccgccatcagcaacgccaacgtacgtaaaccgcagggggcgctggaagatgccacccaccgctggcaggtggcgaccaacgacgagctgaagaccgccgccgaataccagccgctgatcgtgcactataacaacggcgcggcggtgcgcctcggcgacgtcgccaacgtcaccgattcggtgcaggacgtgcgcaacgccgggatgactaacgccaaaccggcgattttgctgatgatccgcaagctgccggaagccaatatcatcgagacggtggacagcattcgcgcccgcctgccggagctgcagcgcaccatcccggcctctgtcgatctgcaaatcgcccaggaccgctcgccgaccatccgcgcctcgctggaggaagtggagcaaacgctggtcatctcggtggcgctggtgatcctcgtggtcttcctcttcctccgctcggggcgcgcgacgctgatcccggcggtggcggttccggtttcgctgatcggcaccttcgccgccatgtacctgtgcggcttcagccttaacaacctgtcgctgatggcgctgactatcgctaccggcttcgtggtcgatgacgccatcgtggtgctggaaaatatttcccgccatctggaagccggcatgaagccgctgcaggcggcgctgcaggggagccgggaagtcggttttaccgtcctgtcgatgagcctgtcgctggtggcggtgttcctgccgctgctgctgatgggcggcctgccgggaaggctgctgcgcgaattcgccgttaccctgtcggtggcgattggcatttcgctggcggtctctctgaccctgacgccgatgatgtgcggctggctgctgaaaagcggcaagccccacgagccgacgcgcaagcgcggggttggccgcctgctggtggcgattcagggcggatacggcaaatcgctgaagtgggtgctgaagcacagccgcttaaccggactggtgctgcttggcaccatcgcgctgagcgtctggctctatatctcaattcccaaaaccttctttccggagcaggacaccggggtgctgatgggcggtatccaggcagaccagagcatctcgttccaggcgatgcgcggcaagctggaggactttatgaagatcattcgtgaagatccggcggtggacaacgtcaccggttttaccggcggctcgcgggtcaacagcggaatgatgtttatcaccctcaagtcgcgcgatgagcgccatgaaacggcgcagcagattatcgatcggctgcggaagaagctggccaaagagccgggggccaacctgttcctgatggcggtacaggatatccgcgtcggcggccgtcaggccaacgccagctaccagtatacgctgctgtcggacgaccttgcggcgctgcgggaatgggagccgaaaatccgcaaaacgctggcggcgctgccggagctggcggacgtcaactccgacagccagaataacggcgcggagatggatctgatctacgatcgcgataccatgtcgcggctcggcatcagcgtgcaggacgccaacaatctgctgaacaacgccttcggtcagcggcagatctcaaccatctaccagccgctgaaccagtataaagtggtgatgcaggtcgacccggtctacacccaggacgtcagcgccctcgataagatgtttgtaatcaacagcgaagacaagccgattccgctctcctatttcgccaaatggcagccggctaacgcgccgctgtcggtgaaccaccaggggctgtcggcggcgtcgaccatctcctttaacctgcctaccggcaagtcgctgtcggaagccagcgacgccatcaaccgggcgatgacccagattggcgtgccgtccagcgtccgcgggtccttcgccgggaccgcgcaggtgttccaggagaccatgaactcgcaggtgatcctgattctggcggccatcgccacggtctatatcgtgctggggatcctctatgagagctacgttcatccgctgaccattctgtcgaccattccgtccgccggcgtcggcgcgctgctggcgctggagcttttcgatgccccgttcagcctaatcgcgcttatcgggattatgctattaattggcatcgtgaagaaaaacgccatcatgatggtcgatttcgcccttgaggcgcagcgcaacggcaacctgccgccggaagaggcgatcttccaggcctgtctgctgcgcttccggccgataatgatgaccaccctggcggcgctgttcggcgcgctgccgctggttatctccggcggcgacggctccgagctgcgccagccgctggggattaccattgtcggcggcctggtgatgagtcagctgttgaccctgtacaccacgccggtggtctatctgttcttcgaccgtctgcggctgcgtttttcgcgaaaagtccctcaaccggtaagcgaataacatgacagatcttccctccagcgtgcgctggcagctgtggatagtggccttcggcttttttatgcaggcgctggataccactatcgttaacaccgccctcccctccatggcgcagagcctcggggagagcccgctgcatatgcatatggttatcgtctcctatgtgctgacggtggcggtgatgctgcccgccagcggctggctggcggatcgggtcggggtgcggaatatcttttttagcgccatcgtgctgtttaccgccggctccctgttctgcgcgcaggccgccacgctcgatcagctgatactcgcccgcgtgctgcagggcgtcggcggcgcgatgatggtgccggttggccgcctgacggtgatgaaaatcgtcccgcgcagtcaatacatggcggcgatgaccttcgtcaccctgcccggccaggtgggtccgctgctcggcccggcgctcggcgggatgctggtggagtacgcctcctggcactggatcttcctgatcaacattccggtcggcatcgtcggcgccatcgccacgctgtgcctgatgcccaactacaccctgcaaacccggcgctttgatatcttcggctttattctgctggccgccggcatggcgacgctgaccctggcgctcgacggtaaaaaagggctcgggctctcccccctgtggctgacggcgctggtggccatcggcgcggcgtcaatgctgtgctatctgtggcacgcgcgcggcaaccgcaacgcgctgtttagcctgaaactgtttaccaaccgcaccttttctctcggccttggcggcagcttcgccgggcgtatcggcagcggcatgctgccgtttatgacgccggtgtttttacagatcggcctcggctttacgccgttccacgccgggctgatgatgatcccgatggtgctcggcagcatggggatgaagcgcattgtggtccaggtggtcaaccgcttcggctatcgccgggtactggtgacctcgacgattggcctcgcgctggtcagcctgctgtttatggccgttgcgctcgcgggctggtactggctgctgccggtggtgctgttcctgcaggggatgattaactccagccgcttttcttcaatgaatacgctgaccctgaaagatctgcccgacgatctggccagcagcggcaacagcttgctgtcgatggtcatgcagctgtcgatgagtatcggcgtcactatcgccgggatgctgctcggtctctacggccagcagcatatcagcgccgatgcggcgatcgctcatcaggtctttctctatacctacttaagcatggcggtgattatcgcgctgccggcgctgcttttttcccgcgtaccggacgacaccacgaccaataccgtgattcgtcgccgtaaaaggagtgagtcttgaagttctggcgtcccggcattaccggcaagctgtttatcgcgatcctcgccacctgcatcgtgctgctgatcagtatgcactgggcggtgcgtatcagctttgaacgcggctttattgactatatcaagcgcggcaacgaacagcgcctgaccatgctcggcgatgccctgagcgagcagtatgcccagcacggcagctggacgttcctgcgcaacaacgaccgctttattttccagctgctgaaaacctttgaacgcgacaacgatgaccgctcgccgccgggccgcggtatgggccacggtccgatggatgagccgcacggtggccccggcccggaagagatgccgccggacgccgcgccggaccggccgctcgacggtccacgcggcgatcgtggcgaccgcggtcccggccccgatatgcctccgcacggctggcgcacgatgttctgggtggtcgatcaaaaaggacgcgtactggtgggcccgcgcgaacgcgtgccgaaggacggtacccggcgcagtattatggtcgacggcgttgaggttggcgcggtcatcgcctcgccggttgaacgcctgacgcgcaacaccgatatcaactttgaccgccagcagaaacgtaccagctggctgattgtcgccctcgccacgctgctggcggcgctggccaccttcccgctggcgcgcggcctgctcgcgccggttaaacgcctggttgaggggacgcaccgtctggcggccggcgatttctccacccgcgtcgccgccaccagcagcgatgagctggggcgtctggccaaagattttaaccagctggccagcactctggaacgcaaccagcagatgcgccgggacctgatggccgatatttcccacgagctgcgcacgccgctggcggtgctgcgcggcgagctggaggcgattcaggatgggatccgcaaatttaccccggactccatcgcctccctgcaggcggaagtcgccaccctcaccaaactggtcgatgacttacaccagctgtcgatgtccgatgaaggcgccctctcctaccagaaaacctcggtggatatcatcaatctgctggaggtcgccgccggcgcgtttcgcgagcgcttcgccagccgcgggctgtcgatcggcgtttcgctgccggaaagcgcaacgattttcggcgaccgggatcgcctgatgcagctgtttaataacctgctggaaaacagcctgcgctataccgatagcggcggcggcctgcagattagcgccagccagagcggggatgggctggttctcgagtttgccgatagcgcccccggcgtcaccgatgaacagctggagcggttggttgagcgtttttatcgtactgaggggtcgcgcaatcgtgccagcggcggctctggtttagggctggcgatttgccttaacattgtcgcggcccacggcggtactttgcgtgccggccattcgcctttgggcggggttagcattaaagtagaactacctctggaacgtaatttatcgagagacgtatgactgaattacctgttgatgaaaacacgccacgcattcttatcgtggaagatgagcccaagctgggtcagctgctgatcgattatcttcaggcggcgggctatgcgccgacgctgattaatcacggcgatcgggttctcccgtacgttcgccagacgccgccgcatctgatcctgctggatctgatgctgcccggcaccgacggcctgaccctgtgtcgggaaatccgccgtttctctgaggtaccggtggttatggtcaccgccaaaatcgaggagatcgaccgcctgctggggttagaaatcggcgccgatgactatatctgtaagccctacagcccgcgtgaggtggtggcccgcgtgaagaccattcttcgccgctgcaaaccgcagcgcgatctgcaggcgctggatgcggaaagcccgctgattgtcgacgaaggtcgttttcaggcttcctggcgcgacaagctgctggacctcacgcccgccgagttccgcctgctgaaaaccctctcccaggaaccgggtaaagtcttctcgcgcgaacagctgctgaatcacctgtacgatgattaccgcgtggtgaccgaccgaacgatcgatagccatatcaaaaacctgcggcgtaagctggagtcgctggacgccgagcagtcgtttatccgcgccgtttacggcgtagggtaccgctgggaagccgacgcctgccggctggcatagttagcccctgcccgacttttccccggttcgcgctgcgcttagccgggctacaggctcaccgccgtctgcgggccgggtagcccggacaggcgcgtcaagcgccgcctccggggaaaaagcagcggctgaaaccggcagatagcggccgcttgatgcatacccggaactgatttgccgtccgcttatcgccaaagatacccgactgatatttactcccctcccccacggcgctacaatgcccgcccttaatgtgggggcactccccaactcgccgtaccgggtgcggcgaatctgacctgtcatcagaacgagaaaatcatgtttaaaccggaactcctttccccggcgggaacgctgaaaaatatgcgttacgctttcgcttatggcgcagatgccgtttacgcaggccaaccgcgctactccctgcgcgtgcgtaataacgaattcaatcacgaaaatctgcagctcggcatcaacgaagcccacgcgctgggtaaaaaattctatgtggtggtcaacattgccccgcataacgccaagctgaaaacgtttattcgcgatctgaagccggtggtggaaatgggaccggacgcgctgatcatgtccgacccggggttgatcatgctggtgcgcgaaaatttcccgcatatggatattcacctgtcggtacaggccaacgccgtcaactgggcgacggtcaagttctggcagcaaatggggctcacccgcgctattctctcccgcgagctgtcgctggatgaaatcgccgaaattcgcagccaggtgccggaaatggagatcgaaattttcgttcacggcgcgctgtgcatggcctactccggccgctgcctgctctctggctatatcaacaaacgcgacccaaaccaggggacctgcaccaacgcctgccgctgggagtataacgtgcaggaaggtaaagaagacgacgtcggtaatatcgtgcataagcacgaaccgatcccggtgcagaacgtcgagccgacgctgggcatcggcgcgccgactgaccaggtgtttatgattgaagaggccaaacgtccgggcgaatacatgaccgctttcgaagacgaacacggcacctacatcatgaactcgaaggatctgcgcgcgattgcccacgttgagcgcctgacccagatgggcgtccactcgctgaaaatcgaaggccgcaccaaatcacattactattgcgcccgtaccgctcaggtctaccgcaaggccattgacgatgctgccgctggcaaaccgttcgatacctccctgctggataccctggaaaacctcgcgcaccgtggctataccgaaggcttcctgcgtcgccatacgcacgatgactaccagaactacgagcacggctactccgtttccgaacgccagcagtttgtcggcgaatttaccggcgagcgcaacggccagctggcagcggtggcggtgaaaaacaaattttccgtcggcgacagccttgagctgatgaccccgcagggcaacgttaactttaccctcgagcatatggaaaatggcaaaggtgaacgcatgccggtggcgccgggcgatggccacacagtatggttgcctgttccggaagatatggcgctgcagtatgcgctgctgatgcgtaattttactggtcagacgaccagaaatccgcacagtaactagttaatttgggttattttttcacgatgtaaagatattagaaacggatcacataccggttcgttcaaagcagatatcatccatttcgctgaaaaacataacccataaatgctagctgtaccaggaaccacctccttagcctgcgtaatctcccttacgcgggcttatttttttatctctctcccggccttccctttccgcatgcggtacactttatgcatcattgagcaacaaaggtcccctgataatgtccacgtttccagccagcttactgattctgaatggtaaaggcgccaatgaaccgtccctgcgagaggcggttaaactgttacgcgacgaaggtatcgatattcacgtccgcgtcacctgggaaaagggcgatgccgttcggtttatcgatgaagccctgacgctgaatgtcgaaacggtgattgccggcggcggcgatggcaccatcaatgaggtggcgacggcgctggtggagcgcgacggcaatctggcgctggggattttaccgctgggcacggcgaacgacttcgccaccagcgtcggcatcccccaggatctggccagcgccctgaagctggccatcgttggccgcgatgtggcgatagatgttgcacgggttaacgataagaccggttttattaatatggccaccggcggtttcggcacccgaatcacgaccgaaaccccggagaagctcaaggccgcgctgggcggcgtctcttatttaatccacggcctgatgcgcatggatacgcttaagccggaccgctgcgaaatccgcggcgagaactttcactggcatggcgacgcgctagtcatcggcatcggcaacgggcgccaggccggcggcggccagcagctgtgcccggaagcgttaatcaacgacggcctgctgcatctgcgcattttcaccggcgaagagctaatccccgcgctgttcagcaccctggccaatccggaaacctcgccgaatattatcgacggcgtctcatcgtggttcgagatcaccgcaccccacgagatgacgtttaatctcgatggtgaaccgctaaccggcaaaaccttccgtatggagctgttaccggccgcgcttcgctgccgactgccgccggactgcccgctgctacgttaatcaggtttcgcaaagcaaagacggcgcccggctggtatacagcagccgggtacgttcgttgagccgctggatgttaaggtaaaacggtacctgcggctggaggaaaaacgctggcaggatacgctttacatgctcctcctgctcggtctcgccgatgctggctgagacggtttccgaacgcaggaagtagtgctggccgtcgcgggtaaagctaaaccagatgttctgattaatggtaaacgcagcgccctgcggcggcgtaatttccccccggaccatcgccagcccgcgactgctatcaaatacgtagcgtaaggaaatatcgccctggtagcctgcgttaattagccgcatctcgccgctgcactggaaatgattgcgctgccagtattgccaggatttgatcattattccgctaagcaccccgataaatacgatagcgattaaccatttaatttcacgcgggcgcattggctacctccttaatgtaatatttggtgaggcattgattatcacgccattgactaaatggctgacggcagcgaatcaccgacacccgcgcttgcccgggataaagcgtcaaataaatccacgagtattcttcacattcaaatttgctgcgcttgataaaattgacatgacgaacgtgatcaaccacatcattattggcaaaaaaatgacattgttgcgaaaatttagcaattatgggcgaataagtttgcaaataagagtcgaattctgtttgccacgcaacaaaaccgccgaccagacagctcagcagcgccgcaagcccccataacagagagcatcgcggccttaaccgctttttttcaggcacactcgcagccgcgacctcctcgtgcacgggcccatccaggggcacctgtggctccggtgccttctccatctcgcacggctgggactccgtcaccgatattgtcgcatccagcctgacgccaaccctcggcagcgtaataataatatcgccctccatgcccagctctttaaatgcccggcgcagcagagaaatattctggtagaaaccgttgctggttacctgggagccatgctttatccacacttcctcgaaaaaggtttcgcgggcaacggttttgccatcctgctgaataagcagcaataaacaacggctggccggcatatttaatgaaaccgttttcgtctcgtcagcaatgagtattagagcaccacgttgaggaataaatgtaattattccattaatcgtatatgttttttccatcctgttccctgagaatagtaatcaagtggataagcggcatgggtaccctactctaaatacggtaatcctttatgacgcagctgataacttaagattattcgcaggcgagtttactctattactcagcggatctggaggcgtaatacgcagtttttccttgcaattaacaaggtttaaatgaatttacagcatggaatattttgagatttgaagaaaatctggttatttatttcaaaatgaataataaacacaagttatgattccatatattttcattcatacaacagatactttcattttagatctaaacaccacttttacattaatagacgatatttataactattaatacatatcatttcaaagttttatccaaaaacagggcgcattgtccgcgagacaatgcgccatatcgcttagtatgccgccacctcgcgcgccatttcgcgcgtatattgccggctggcgttaaccagcatctgcgtataggccgtttgcgcctcgccgttgaccagcgcatcgaccgtcagggtttcaaggattttcccgtactgcattaccgccaccttctggcataaatgggcaatgacgcccaaatcgtgggtcaccatcaggtaagtgagtttagcctcctgctgcaattctgccagcaggttgaggatctcggcctgcaccgacacatccagcgccgacgtcggctcatccagcagcagcacctgcggctcaaggatcagcgctctggcaatcgccacgcgctgccgctggccaccggaaagctgatgcggatagcgttcgcgaaacgcacgattgaggcccactttgtccagcagcgcatgaatccgccggtcgcgatcgtgaatgcgatgaatctgcagcggctcttcaaggatatcgccaatagtgtgacggggatgcagcgatccgtacgggtcctgaaataccatctgcacctgacggcagcgctcgcggctaatctcatgccctaagcgctgcccgtcaatagttaactccccctgccagtgggtaaacagccccgccaggcacttcagcaccgtggttttgccggagccggactcccccaccagaccgtagatctcgccgggcttaacgtggaaattaacgtcgtacagcacctggttacgcttctccccttcgccaaacgcgaggttgagacgttgaacttcaatcatcatccactccttattccgttaaccagctggcctggcgctgcagcaccggcagtatcgggcgacgatgctgcatatccggcagcgagttaatcagcccctgagtatagggatgacgggcgttatcgaggtcgcaggcggcaatagactccaccacccgtccggcgtacatcaccagcacgcggtcgcaaaagctgcgcaccaggttgatgtcgtggctaataaaaatcagccccagcccgcgcgactgaaccagatcatccagcaggcccagcacctgcaggcgcaccgacacgtccagcgcggaggtcggctcatcggcaatgatcaattccgggtcggtaatcagcatcatggcgatcatgatgcgctgcccctgtccgccggatatttcatgtggataaagctgataaacgcgctccggctggcgaatacgcaccacctccagcatctccagcgcctttgccttcgcctcatctttgcgtcccggatgatgggtcagccaggcctcggcgatttgcttaccgacgcagaccaccggattaagcgaatatttcgggtcctgcataatcatggagatacgtttgccgcgcacgccacgcatctgcgcttcagtaagatgcagcagatcgaggttggcaaactgcatccggctggcgctgacgcgggcctttttcggatgcagctgcagcagggcgcgcccaacggtggatttacctgaaccggactcgccgacaatggccagcttttcgcgccccagctggaaggagacgccgcgcacggcatgggtcaccgcgctgccgttaacaaagtcgacgcacagatcgcgcacgtcgagcagcggagcattattcgctgcggggatcgaggatgtcacgtaggccatctcctaagaagttaaacgctaagctgttgatcagaatcgccagccccggaatcgtaaccacccaccagcactccatcatgtaagtgcgcccgctggagatcatcgccccccactccggctccggcggctgcgcgccgagcccgagaaagcccagaccggccgcggtcagaatgatcccggccatattcatggtgatacggataatgaccgagggcagacacagcggcacgatatggcgccagaggacgcgggccgatgatgcgccctgcagacgtacggcggagataaaatcggcctggcgcagagagagcgtttcggcgcgcgccaggcgggctatcggcggccaggcggtgagcgtgatggcgataaccacgtgctccagccccggacctaaggcggcgacaaacgccagcgccaggaccagactcgggaaggagatgaaaatatcggtgacgcgcatcagcaccatatcgaccttaccgccaaaatagccggcgcaaacgccgagcagcagcccgagcggaccgacggtcaccgagaccagcagcacgatatagagcgtgatgcgcgagccgtacaccaggcggctaaatatatcccggccaaactcatcggtgccgaaccagtgctgcgcgttcggcgcgaccagcgcgctgttcaggtcctgcaccagcgggttatacggcgcaatcagcggcgcgaaaatcgccaccaccagcagcagaaagataattccgccgccgatggccgttagcgggttgcgcgccattttgccgataaacccgacggcccgcgccgccgcgcgttgcagccgctgacggccttcgcccgtgccgcccgaaagcggcgaatccagagaaacggtcatgattttgtcctcgggtcaaagaattgatacagcatgtcggagagcaggttgagcatcacgaagatcgcccccaccagcagcacgcagcccattaccgcattcatatcgcccagcagcaggctaccggtgaggtaggagccgaaacccggccacgagaagacggtttcaatcagcaccgcgccttccagcagcgcgccgtaggccagcgccaccaccgtcagcagctgtacgaggatattgcgaaacgcatggttccagatgacctgacgctcggtcagccccttcacccgcgcggtaataatgaactcctgcgacagctgggccagcataaagctgcgggtcatgcggctgatgtaggccagcgagtgaaagccgagcagcgaggcgggcagaatcaggtgattaatggcgttccagaagacctggccgttgcccgccagcagcgcatcaacggtcatcaggccggtgcggcgcggcaccacaccatccagcccgagatctaccctcccggcgccacccacccagccgagccaggcatagaacaccagcagtcccatcatcccgacccagaagatcggcgtcgagtagcccgccaggctgataatgcgcacgacataatcggcgacgctattgcgccgcgccgccgccagcacgcccagcggaataccgaggcccgcgccgacgagaatcgccatcgtcgccagctccatggtggccgggaagacgcggataatgtcgtccaccaccggtttcccggtcagcagcgcgttgcccagatcgccgtgcagcaggttgacgaaatagatgccaaactgggtggtcagcgatttatcaaaccccagctgatggtaaacctgctggtaggtactctggtcagcatccgggccgacaatcgccagcaccgggtcgatgggcatgacgcggccaatggtaaaggtcagcagcagcaggccgaacagcgtaatcaccacctgcagcagccgttttgataagcgccggccgcgtgagccgggcgcaaggattgcgatactcatcctttttctccttcgcggactttatcgacgtcacgcagaaaagtggtggcagaggggtgcggctgatactgccgcacctcgttacgcaccaccacggaatcgaccatctgcgaaagcggaataagggccgggaccagctggtcgtagcgcgtctggatggcctggtagtcggccacctgtttttgcggatcgcgttccagcagggcgcggtcaatcatcgcgttgagctgcgggtcgtaaaagccggtgcgccagccctggaagttggtcaggcgcgcctcatcgctgttatccgggttatagaccagcgcgcgcaggctggagtgcgggtgcggctccattccgctgccgccgcgtcctaccagcaggtcaaatttacgctcgcgcatcgcgccgtagatctggttaccggtgccggtgataattttggcgttaatccccgcctgcatcagcgtcgactgcacggcgattgcaatgttcaggaacggctgatccgagaggacccgcaacgtggtatcaaagccgttgggatagcctgcttccgccagcagctttttcgcccgcgccacgtccagcttatagcccgggtcgggcagcgttgacggcatgcccgccttaatcggccgctggtgcagcaccccgtagcccggcatcagcgctttattgatgccctggtagtcaatcagatagcgcaccgcttcacgcactttcggatgggcgaagtgcgcctctttcatgctcatcgccacgtagtacatggtgccgcgctgcaccgcgtcgacggtcagctgggggtcgctgcgcagggcgttgatgtcggaaaccgccatattgttggcaatatcgaggtcgcctttttcgatcatcaggcgcagggtttgcgactcctggaaatggcgcagcaccacgcggctcattttcgcctcgccgcgccagtagtcaggattgcgcttcatgcgcagcacatctttcgcctgccaggtttccagcgtgaacggcccggagccggcttcatgggtggtcagccagcggttaccccagtcgttatcctgctggtggctttgcaccgttttgctgtcgagcactccgaggttgcccagcgccgccagcgagtagatcaccagctgcgggtcgttatctttgggcaacacgatctgcaccgtgaagctgtccggcgcgctgacctggccgtcgatgtttttctgactgaagccgtaggatttccataccgaggcctgcgccaggttgaggtgcaggatgcgccgcatcgaccacaccacgtcggcggcggtcagcggattgccggagtgaaatttcacgtcgtcgcgcagatgaaaggtcagggttttgccgtcggggctgatatcccaggatttcgccagcgcgggcttaacgttggtgagctgctcagggtcaagctccaccagcgagtcgtagaggttgaccacgatccccaccacttcattaccggtcatcgccgccgggtccagggtgagcaggttattcatattcataccgatgatgagctggtcgggcggcgttttcgccatcgccgccccgctccccatcgacacggcgagcgcgagcaagcacgctgccagtcgggaggtttttttcatatctctgtttgcctgtactgtagggtacatgttgccggatgacggcattttcgccttatccggtctaccgggccgcagacccgataagcgcagcgccatcgggcatttatttttttgaatcagtcgtggctaacggtattggcttcgatatacgcaaaattaatgtcttcgccgaggcccggacgttgtgacagatgcacaaagccctggtcatccatggggtcgacaaggctgttgagataagccgccggttcatcgtagtcgaggaacggatgcagcaggccgcgctcgtaccagcggcagttgcggatcgccccgaccaccgccaggcttgccgcgccgttgccgtggacttcgcaatccatgccgaaagattccgccagcgccgcgaccttcatggtcggggtaataccgcccacgccgttagcgccggcgcgcagaatgtcgcaggctccggctttcacccattcggcgcgcatgcggtgcttgccgccgaagctctccggcccgacgatggggatcgacaggttttccgccagccacgcgtaggaggacatcgaatcctcctccatcggctcctcaaaccaggcgaagttgagtttttccagctctttgccgatccacagcgcctcggcgcggctgtaccagtgatagccgtcaatcatcaggtcaatatccggccccaccgcttcgcgcaccgccgcgcaggctttaatgtccattttgggattgggcgcaaaagagattggcggcatccaggtgtgcagcttgatggccttgtagccgcgggcgaccagcttttcggcaaaggcggcatactcctccggggtcgacagaccgcccggcagatcgtcgccgcacatcgtgctgccgtaggccgggacgatgtcgcgatagccgccgagcagcttgtaaaccggcatcttaaggctgcggcctatcaggtcccacagcgcctgttcaataaacgacagcgcgcgctcggtcagctggtgagcgctgccgcgctgccagtggttaagatcctgccagatacgctcgcggttaaacgggtcctgccccaccagcaccttgcggaaaaaggtattcaccacgaacgggcgcaccacttccggaggcgcaaacgaaaagccctgcgcgccatcatcggcggtgatggtcagcatcgccattttggccatgctttcagcccccggatgggagtgcccggcgctgtcggaaacccgacgcgtgggatactggaaaacggtgacatttacagattcaattttcatgctcggtccttatcacggccaaatccgatcgatagaagcaaatcggcaaagtggtttcacattattgaaaatacgtttcaatatctaatctaagcacaattacgcagcagtgcctcggacaaacaccgctaagcaaggcaataaatttgggcattggcacaacaaggcgtgactgttttcacaaaagataagcgaaatgtgaggcggatcggcatggtgaaaaaggggggcgtgagcgcagaaaagagagtaaccgaccgtgtacatcccgggattttctgcgctcacgaaagggtgagttattcgaccgcctccgcctcggcggtgagggcttccagcagttcaggcagcgcccgatagcggccagcggcgccctgaaaacgcgcgtgctggctatcttcggcaatcactatcgtggcaatccccgccgcccgggcggcgctaaagccgttgaagctgtcttcgatcaccaggcaccggctggcgtcgagattcagcttatccaacgtcgtcagatacaccgccggatgcggcttgccctgcgcttcatcgtccgcgctgcaaatcacatcaaaatagtgccagagcgagagcttgttcagcacggcggcgataacctgccgggacgaggaggtggcgagggcaattttataaccggcatggcgaaaatagcgtaacgcctcatgcacgccgcgcatcggctcgccttcggcggcgatcaggccggtaatacgctgcaatatcgcggcctcaagccgctgcggggcaagctcaagctggcaatagcggcaccaggtgcgggcaatatcgtcgaggcgtttgcctttggtcagggtttcgcactcctcgacgctcgccgttgccccccactgcgcgagggcgtcgatttgcgcctgccgccacagggcttcggaatcaataattacgccatccatgtcaaaaatcactgcctgaatactcatcatccacctcattaaggccggcatgcctggcatgccggccgcatcaccttaagagaactccacctgctcgctggccggcgcttccttgtgggaaaaacccggctgctcgacgcgaataaatgcacagaggaaaaaagccgccacgtacagcgcggtataggcgatcaccaccccgatggtgctgaagaacggtagcaaaatcaccgcaatggccggcgcgagaaagttcgacatccccgccgacaggttatataccgaaatggccgcgcctttgtgcttcggctccagcgccgggaaaaccgccgccagcggtacgaacgcggcgacaaagatccccagagcgatagccggaagcagcgccatcgcgaagttatgtccgaagtgctgcggaatgtaataaaacgccaggctggagagcgccatgccgatgcagccgaaccagcgcaccaccttcatccagcccagtttttcgcccagaatgccccacagcacgttcgaaaatatggtggtgaagaagaagaccgcccacacctgcagccattccgaggtggtaaagcccagctcatcgacgaacatcatcggcataatcaccgcaaagccgaacagcgacagggtgttgataattcgcaccatgctcgacagcagaatattgcggttggtatagagcagcgtcgccgcgcggcccagttcggcaaacttctcgcgggtggtcaggttctgcatatggtgcggcgttttaatatggcgcagggaagccagcgcaatgatgccgccggtgacgcagaaagccagcgccagccacaatgtccccagctcgccgatatgcgggatggtaaagctcggaatatagctgccgaacacgccgatgccgatcgagtaaaccgcccagaaccagccgatcgccgagctggcgttatcgcttttcacgttgtggacaatggcgacgataaacgagtaaaggaacagcggatacgcgaagccgcggatgccgtagaaaaccaggatcagggcatagttcgcgtgaccgaggccgaaaacgaggaacagcacgtggaacacgcaccacagcacgaagccaatcatcatggtcttcagcggcgtgatgatttccgccaccacgccggagatccacgccgacagcgcggcggccaggccgtagagggtaaaggcgaacgatgcctgcgccggggagaacccgagctctttgatgtagtgcgacaggaatgccagttcaaaaccgtcgccggtcataaatacggcaatggcgatgtatccccagagcaggttcaggggtaaaccgagccactgtttattattgatggacataatgacctcgtttttagggtacaggaggccgctccggtcagttcaccggagcggttatggtgataaaaattaatgctgccgatagttcagatcgtttaaatacagggccttaaactgcgcatagcgccgcatcagggtttgatggcgtaccgggtccgcgcgccaggtctgccagatctccggtttttcacagacttcggtaatcggtttgcccgccgccaggcaggccagccgcgccgcgcccagcgcgccgccggtctcaccgcctttgtgggtcaccaccggcatatcgaggatatcggccaacagctgcgcccagaacgggctgcgggcgccgccgccaaccagcgaacattgttcgatctgcgtaccgctctctttcagtacctgcagaccgtcgctgatgccgaagctcaccccttccagcaccgcgtagccgagctgggcgcgcaggctggagtgggtcataccccagaacatgccgcgcgcgtcaggatcgttgtgcggcgtacgttcgccggagagatagggtaagaagaacggcgcgtgggacttctcctcttcgctaagttcggcaatctcctccagcagcgccacttccgtagtgccggtcaggcggcagaaccactgcaaacagctggcggcgctgagcatcacgctcatctgatgccacagattcggcagcacgtgacaaaacgcatggaccgccgactgcggagccggacgataggcgtcggtcaccacaaacagcaccccggaggtgccaagcgaaatgaacgcatccccgggcgaaaccgcgccgacgcctatggcgctgaccgcgttatcgccgccgcctccggctaccgctaccgaggcgttcagcccccagcgttcggccacctgcgggtcaagggtggcggaaacctcacagccttcgaccagggtcggcatctggctgcgcgccaggccgcatttatccagcagagcgtcggaccagtcgcgcttcgccacgtccagccacagcgtcccggcggcgtcggacatatcggagacttttttaccggtcatccggtagcgcagataatccttcggcagcagcaccgtggcggtgcgctgaaagttttccggctcatggcgacgcacccacagcagcttcggcgcggtaaagccgggcatcgccaggtttcccgccacctgatgcagctccggcgccctcttctccagctccgcgcactccgcggcgcagcgggtgtcgttccacaggattgccgggcggatcgcctccccctcggcatccagcagaaccgcgccgtgcatctgcccggaaaggccaatggccttaatggccggccagtgctgggcgcatttttcccgcagcgtggtcatcagatactccgtcgcctcccaccatgactgcggcgactgttctgaccagtgcggatggggccgctgaatgctcagcggcgcgctatggctggcgataacctcattgttctcatcaatgaccagcgctttgacttccgatgtgccgagatcgatacccagatacatagtcacctcttagttaatcagcgtataaacggccgccactttttcgcgcatcagcgcgaggaaatcggcgttttcggccagttcgccaaacagcgctttatcgcgggcgtacagggccagcggatcgttggcttcaaacatctgatgtaccccctcggcgtcgaggatgccgtcctggtactcatacggcagagtgcccttgtgccactgctccataaagacgaagaacagcgcgggcagcatagcggtggcttgcgggcgaacgccgcgctggtagcactcctgcagggttggggcgatcatcgccggaattttcgagaagccatcggcggcgacgcgctggttggtgtcctggatatatgggttggtaaagcgtttgagcaccacgtcgcgataggccggcaggtcaatgccgttattgccgaggcatgggatcacatcttccgtaacgtagcggtcggcaatggcgtagatgaaatccgttagcgtgctttcatgaatgtactgctggccaattaacgttcccgcccacgcaatgcagctgtgcgacgagttcagaatgcgaattttcgcctcttcgtaaggaatcaccgacgccaccatctcaaccccgaccgcttccaggttcgggcgttcatcgcggaaattgttttccaccacccactggataaaggtctcgcccatcaccggcgctttatcgtcaatgccggtctgcgctttgatgcgcgcgggcaggtccgccgccgggcgcggggtgatgcggtcgaccatggtgttcggacaggtggtgttggcggccatccagtcaatcaccgcctgcttgccggttagctgcaggaactcaaccataccgtcgtggaagcgttcgccgttatggcgcacgttatcgcagttcagcagagtcagcggcccggcgttgtccgccatacgcttttccagaatccgcgcgatagtgccgtaaatcgttttgcactcccctgccagatcggcctgtaaatcgggattgctggtttccagcttatggcgggtattcaggtagtagccaccttccgtcacggtgaaggcgatgactttggtctgcgggtttgccccttcgttaatcagcggctgcagcccggcctgccacggcagcagtttctgaatggaggtgatctcttcatattcacgttcaccttccgggctgacggtttccagcacatagcgcccgccctgcgccgccagcgcctgaaccacctgttcggcgtcgttgcggatattccccgccgcgatgtgccagcgtttatctccggaagcgatcagacgatgcagataccacgcctgatgcgcgcgatgaaaagaacccagaccaatgtgaagccatgtgaattgattgttcatgttccgctctccttgagttgatggcctcactgtaaatgatcaattgaccaaaataagagccacggatcacaaaagaacaattacccaataaaattacaaatgaccagaaaagagcaaaagcttgccagttttcccgaccacggcgagaatgcgggtattcgccgggcgaaattatcgccgcggcccgacacttagggcaggaaagcatgagcaaagaagatgatatccggctggatcaaaaggtccgcgccgcgtggatgtactacatcgccgggcagaatcagagcgagatcgccagccagcttggcacgtcgcggccggtggtacagcggctgatcgccgccgcgaaagaagaagggattgtgtcgattagcctgcaccacccggtggcgaactgcctcgactatgcgcagctgctgcaggagaagtaccggcttatcgagtgcaatatcgtgcccgcctttaacgaagaaagcaccctggatagcgtctccttcggctgctatcagctgatggcccgctatctgcaggatgataaagagaaaatcatcggcctgggttccggcctgaccctgaaaaaagcgctgcagcgcatcgacttcgacagtctgaacacccgctgcgtcgccctgatcagcgccatggacgccgacggacagtgcaactattacgatgacgtcccgctgctgctgaccagcaaaattaaggccaagtactatcagtggcccgcgccgcgctacgcgcagacccaggaggagtacgacatgtggtgtaccagccggctgtttcgcagcgtttccgccgtcgcccgccgggcggacgttatttttgtcggcattgggccattaggtacccaaagccccatcttcaaagatggctttatcaatcaggcgcagatggatgagctgaccgcacgcggcggcatcggcgagatcatgggacgctttatcgatgccgaaggcggcgtggtggagagcgaaatcaacagaatgatcaccagctacgatatccgccagaaccagtgcccgcgcatcgcggtggcgtgcggcgagtacaaacgtccggcgattctggcggcgcttaaaggcggctggatcaacggcctggtgaccgacgagcacaccgcccgctggctgctgacgcgctaacggcggcagccggatcagcggctgctcatcaacagcggcgggatttcaatccgctgctgcccggcctcgccggcgtcaataatcgtgaacaccgcttccagcatcgccggcacgtcctgctgcaccatgtcgatatcgtgccccagcagatagacgaacgggtcccagtcaaagcagcccatcggcggctgggcgctgccggtaagtcccgcctgcgacagccaacgcaccaccccttccagcgatattgtcgagttgacaaatagccccggcaatggggtcttcgcggtagcaaaccgctcctgcaggcaggcctcaactttgccttttgaatagccgggcgccaggatattttcctgcggcacgaccagcccctgctcccgatgcgcatcgtggaagccgcgtaaacgctcgcgggtgttatggtcgctgctgcgcccaccgataaaggtcagcggcgccagcgctccccgacggcgagcgctgttggcgaggattttgtgggtcagcgccttcgcgccgccgtagttatccgatatcaccgacggggcgacagagcccggcaggtcgagattgaccgtgggcacgcctgcctgctggcacagggcggtaattttgtccggattggttgccccggtggccaccacccagtcaacctgccaggagagcatcgcttttaccgcttcgatctccagctctggcctccggcgcgtacaggtgataatcggcagcaggccgcgctcgcgggccatctcctcaaagcgctccgccaccgaaccgaaatagcggttatcgtatttggggataatcataccgatgacgcgcgattttttgctgcgcagcatgctggcctggcggttaatcgcatagccctgctcctcggcaatccgcgtcaccttttcggcaagcttcgcgctgatgcggcgctttttccagttgccgttgaggatagcgctcaccgcgctcgccgaaacgccggacagttccgccaggtcgtaaatcgtgattttcttcattttcccaacttgcgtcacaaaatcatttcgctgttaatttccccacttgctcaatcgatgaagctagcgcaacatgagcttcatcgattgagcttccattttacttcccgaagtattaacgcattcagcgtgaatacgccagcggacatcaaaaaaatgacgctcatattcaataccttaacaagttttcgtctccagcgtcgaacgcgatgccctcgcgttcgatagttccaaccagactctgtaaaggattataaaatgaaccactctgtctcctctatgaatacttcccttagcggtaaagtcgccgccattaccggcgcggcgtccggtatcggcctcgaatgcgccaggaccctgctgggcgctggcgcaaaagtggtgcttatcgaccgtgaaggcgagaagctcaacaaacttgtcgccgaactcggcgaaaacgccttcgccctgcaggttgacctgatgcaggcggatcaggtcgataatattctgcagggtattttgcagctcaccgggcgtctcgatattttccacgccaacgccggagcgtacatcggcgggccggtggccgagggcgatccggacgtctgggaccgcgtactacacctcaataccaacgccgccttccgctgcgtgcgtagcgtcctgccgcatcttatcgcgcaaaagtccggggacattatcttcaccagctctatcgcgggggtggtgccggtgatctgggagcctatctataccgcgtcgaaatttgccgtccaggcgtttgttcatactacccgccgccaggtttcgcagtacggcgtgcgcgtcggcgccgtgctgccgggcccggtggtcaccgccctgctggacgactggccgaaagccaaaatggacgaagctctggccaacggcagcctgatgcagccgattgaggtggccgagtcggtgctgtttatggtgacgcgctcgaaaaacgtcaccgtgcgcgacattgtgatcctgccgaacagcgtggatctctgaccgttcaaccagactgtgtgagaggatgttatgcaaagcgatacgcaacatattattggcgtcgatgtcggttcgggcagcgttcgcgccggggtgttcaatctgcggggcgagcttctcgcccacgcgacccgggaaattaccctgttccgcagcgccggaagcgtggtcgaacagtcgagccgcgagatctggcaggcggtgtgctactgcattaaaacggcggtggccagcgccggggtcgcgccgtcatcgattgccgggatcggcttcgatgccacctgctcgctggtggtgattggcgataacgacgccccgctggcggttgggccttcggaagatgcggagcgcaacattatcgtctggatggatcaccgcgccaccgggcaggcggaaaagatcaacgccacgggccacgcggtgctgcagtacgtcggcggtaaaatctcgccggagatggaaacgccgaaaattctctggctgaaggagaaccgcccgcacatttatcagcaggcgcgccacttcttcgacctcgccgattatctcacctggcgctcgaccggcgatttagcccgctcggtctgtaccgtgacctgtaaatggacctacctggcgcatgaacaacgctgggatgccagctacttccgccagattggcctcgaagagctggcggatgaagattttgtccgcatcggccagcggattgtcgatccgggaaccccctgcggcgacggcctttgcgccacggcggcagaggagatgggcctgccggtcggtactccggtggcggtcgggatgatcgatgcccacgcgggcggtatcggcaccgtcggcgtgcttaacggcgcggtcaacaatatggcctacgtcttcggcacctcctcctgcaccatgaccaccacgcaggaagcggtgttcgtgcccggcgtctgggggccatattactcggcgatggtgccggggttctggctgagcgaaggcgggcagagcgcggccggagcggccatcgaccagctgttgagcttccatcccgccgccgccgaggctaaggcgctggccagagcgcgcggcgtcccgctgccggtttatcttgccgatagcgtgctggcgaaagtggagcgtccttctgccgcggtcaaactcgccgccgggctgcacgtggtgcctgaatttttaggtaatcgggcgccgctggccgacccgcacgcgaaagcgattatcgccgggttggggatggagcgggatctggacaacctgatggcgctctacgtcgccggattgtgcggcatcggctacggcctgcggcagattattgacgcccagaaggcgtgcggcatccacagcgagcatatcgtcatcagcggcggagccgggcagcatccgctggtgcgccagctgctggcggacgcctgcggagtgagcgtggtgagtaccgaatccagcgaaccggtgctgttaggttcggcgattctcggcgcggtggccggccagatcgccccgtccctgccggaagcgatgaagcagtttacccgggtggataaaacctaccgctgcgttgcccagtatagcgccgatcatcagcggcgctatgaagcgtataaaacgctacagcacacggcgcggctgattcgcgagtaagcaagatcccgggctgcggcgtaaacgccctacccgggctaccagaccgcacgaaaccgtagcccggccaggcgtagcgccgccacacgaatgcttaagcgatggtgactttgccgtccagatagacatcctgcacggcattgatcagcttcacgccgtcggccatcgattttttaaacgccttacggcccagaatcagccccatgccgcccgcgcgcttattgataaccgcggtgcgcacggcatcggagagatcggtttccccgcccgcggcgccgccggagttaatcagcccggcgcggcccatatagcaattcgccagctggtaacgcaccagatcgatcggattatcgctggtgagcttgctgtaaacccggtcatcggtatagccgaagttcaccgctttatagccgccgttattttccgccattttctgcttcacgatatccgcgccgatggtcgccgccagatggttagcctggccggttaagtcagcggaaacgtggtagtcgacgccatcttttttaaacgccgaattacgcagataggcccacagcacggtcaccaggcccagttcgtgcgcgcgctcaaacgcagcggagatttcttcgatttgacgacgagactgttcggaaccgaaatagatcgtcgccccgaccgccacggcccccatattgaacgcctgctcaacgctggcgtacagcgtctgatcgtattcggtcgggtagctcagcgtttcgttatggttcagcttgaccaggaaggggatgcggtgcgcatagcggcgcgacaccgaggccagcacgccataggtggaggccacgcagttacaaccggcttcaatggccagttcgacgatatttttcggatcaaagtacagcgggttggcggcaaaagaggcgccagcagaatgctctacgccctggtcgaccggcaggatcgacagatagccggttcccgccaggcggccggtgttatacagggtttgcatattacgcagcaccgccggcggacggttgttatcaaccatcacccgatcgacgtaatccgaccccggcaaatagagctggtcggctggaatcgtcatacagcggtgctgtaaaagcgtgtcggcatctttgccaagcaactgcgtaatatcagtcatagcgatctcccgtaagtgccggtcgaaaccggcatgcattttcccaacccaattattttgggcagcaataagtctggtatcgaaagtgggatttttccattgcagagggatttttaaatgtcatccgctgacatcatccataaccgggaaaatgttatatcggtcaaagttccaccccaaaggtatttaaaaggtattacataatggtattgttattacgtaccttacctatcatgaaggatttaaagatgaaaactacagtaaagctgtcattcatgatgttcattgagtggtttatctggggcgcgtggtttgtccctttatggttatggctgaataaaagcggatttaccgctggtgaaattggctggtcctatgcctgtaccgccattgcggcgatcctttcgccgatcctcgtaggttcattgaccgatcgctttttctcagcgcagaaagtgctggccgtactgatgtttgtcggcgcggtattaatgtatttcgccgcgcagcaaaccaccttcagcggcttcttcccgttgttgctggcctactccctcacgtatatgccgaccattgcactgaccaacagcatcgcttttgccaacgtgccggatgtcgaacgtgactttccccgcattcgcgtgatgggcaccattggctggattgtctctggcctggtctgcggctttctgccacaaatgatgggctatagcgatatttctccgaccaatatccctttgttgatcgctgctggcagctcggtgctgctgggtatttttgcctttatgctgcccgatacgccgccgaagagtaccggcaagctggatttaaaagtgatgctggggttggacgcgctcatcctgttacgtgataaaaactttcttgtgtttttcttctgctcattcctgttcgctatgccgctggctttctactacatcttcgccaacggctacctcacggaagtcggaatgcaaaacgcgacaggatggatgacgctcggccagttctctgaaattttcttcatgctggcactaccgttcttcaccacacgctttggcattaaaaaggtattattgcttggtcttatcaccgcggcgattcgttacggatttttcgtctacggcggtgcagatcaatacttcacctatgccctgctgtttcttggaattttgcttcacggcgtaagctacgatttctattacgttactgcctatatctacgttgataaaaaagcaccggtacacatgcgtacggcggcgcaagggctaatcacgctctgctgccaggggtttggcagtttactcggctatcgtctgggcggcgtaatgatggagaaaatgtttgcttatcaagagccggtaaatgggttgaccttcaactgggcaggaatgtggggcttcggcgccgctatgatcgccgttatcgccgtgttgtttatgattttctttcgcgaatcggatacagagatcaccgctattaaggtgcaaaacgacgattgcgatgctgcactgaaacaagaggaagttaaatgaaaacggaacgtattctcggcgcgctctacgggcaggcattaggcgatgcgatgggcatgccgtctgaactctggcctcgctcacgcgttaaagctcactttgggtggattgaccgtttcctgccggggccggctgaaaacaatgcagcctgttactttaatcgtgccgaatttacggatgatacatcgatggcgctctgcctagcggatgccatcattgaatgtcatggcaaaatctcaccagaagttatcgggcgcaatatccttgcctgggctgaagggttcgatgcgttcaataaaaacgtgctgggtccgacttctaaaattgcgctcaatgccattcgcgacgcagtaccgatcgatgaactggagaacaacggcgtcacgaatggggcggcgatgcgcgtctcaccgctaggctgcctgctcgcaccaacacagctagacagctttattgatgaggtggcgctggcttccagccccacgcataaatccgacctcgcgattgcgggtgccgtcgtggtggcgtgggcaatctctcgggctatcgaaggagatagctggcaggctattgtcgactcgctacctgctgtggcacgccaggcgcaggaaaagcggatcaccacttttagtgcctcgctggctgcccggctggagttggctttgtgcgtggtacgtcaggcaaatggtattgaatcagcctgtgaggggctctatcagcgcgttggcgcaggcaccagtacccttgaatccgttccctgcgcaattgcgatggttgagctggctggaggcgaccctaaccgctgcgccattctgtgcgcaaatctcggtggcgataccgacaccatcggcgcaatggcaactgcaatttgcggtgcactgaggaggatttctgctatcgacgccaccctgaagcagcagcttgatgaagtgaaccaactcgactttacccgctacgccacggcgcttgcacactaccgagagcaacgggaggcatcatgaatctgatgcaacgattacccaccttaggcaacaagcgtcccatcaccatcgtcggcgcggcggtcattgatgtgattgctgacgcttacgccctcccctggcgaggctgtgatattgaactgcaacagcaaagcgtcaatattggcggctgtgccctgaatattgcggttgccctgaaacgtctgggaatggaggccgataacgccctacccgttggacaaggcgtatgggctgatatcatccgtaataacatggcccgggaagggctttccagccgcatcgacggcgtcacgggtgacaacggctggtgtcttgcgctagttgagccggacggcgaacgcacgtttatgtcgtttagcggtgttgaaaaccagtggaatcccacctggctggcgcaactaactgttccgccgcaaagcctggtgtcactttctggttatcaactggcatcgccctgtggggaggtgctggtgcactggctggaatccctgcgtgatattacaccgtatattgatttcggcccgcgcatcgctgatattcccgagacactaatgcagaggatcatggcctgtaagcctgttatttctctgaatcgccaggaggcggagatcgccgcagagcgctttagattacccgtggcaaccgaagcgtttggtcaggcctggctaaagaaattcgcaatgccgttgattgttcgtcatgacgaagagggtgcgtggtacttcagcgcggaagaacagggactggcagcgccgttccctgtggcggtagtcgatacaatcggtgcaggtgacagccacgtaggagggacgctagccggactcgcctcgggatggacgctgggcgagtcggtactgcttggtaatgcggttgcgtcctgggtggtaggacatcgcggcggtgattgtagcccaacgcgcgaagcattactcctcgcacacaaagacgtatagatcgctacgacagcggttgatgctgtattcaatcggccgctgttgttgatcgagtgcaacctgattgataaccagcaccggtattttttcatccatatgaatgtgcgactgaaattcggcatccggcatacgtgcactgacgcgcgagcgcgtacgctgcgggaagatatgctgactgcgaaaatagtcatacagcgacacgccgatagcatcaacatcatgaatcagttgggcaggaacccaggactcttctatggacacggcctcatcatccacatagcgaattcgcttgagcaaaaatacatcactttgcggggcaatcgccaattgcgtcgccacctcatccgggcagctcactatccgtttgttgacccacagagtgtcaggtttttttcctctgagcaccacctgctgcgaaaaaccgcgcgcctctttcaatgaatactcaaagatattattgatttgcgtaccgtagccgcgggctcgggtcaccaccccttcgtcttccagcgtccgcatcgctttgcgaacggtaatgcgcgacacccccgtcaactggctcaggtcgcgctcgccggggagaatattaccgtgctccagcgcaccactgcgtacagcatttttaaccgtttcagcaaacttcaggtacagcggcgtgttatccggcgctgcaatacgctcgttcagttgtgctatcaacagggtatgcgcttgttccatcgtgttttttcctggcgaaagtcaggaaacagtatacttttcgccaggcatgaagactaccaccatgcgtgaaaatggtgtaccggaccgatgccgtgccccacttccagcgaatccgcctgcgccagcgccgccgaaagccagcccttggcttccgccacggttcgcccccaatcctcgtaacgcggacgcagggccgccagcgccgccgacagcgtacagcctgtgccgtgggtatttttggtctggactctcggcgcggtaaagcgctgctccccgtcgcgggtaaagagccagtccgggctttccgcatcatcgagatggccgcctttcattaataccgctccgcagcccatgcccagcagcgctctgccctgctccagcatctcctgttccgttctggcatgcggcgcatccagcagcgccgccgcttccggcaggttcggggtaatcagcgagacctgcggcagcaggcgctggcgcagcgtctccaccgccgaggcggagagcagcggatcgccgcttttcgccagcatgacggtatcgagcaccacatttttaatctgataacgcgccagccgttccgccaccgcctcgacgatatcggtttccgccagcatccctattttggtggtatcgatacgcacatcgctgaaaacggaatcgagctgcgcggcgacaaaatcaggctctatccggtacaccgactggacgccgcgggtattttgcgccaccagcgcggtgatgaccgagcagccgtaagcgcccagcgccgagaaggttttgagatccgcctggatccccgcgccgccgctcgggtcggtgccggcgatggttaacgcattaattcgtttcacagatcgcctcccgcatagagcgcatcgaggaaggcaggagtaaagctgccggggccgccctgcagcgccgcttttccccccgcaagcttcatcagaccgcaggccgcggccacgttctccagccgatcgccgggcatcgccgcagcggcggcaaccaccgccgatagcgcgcagccggtgccgactacccgggtcatcagcggatcgccgccggtgaccgcgcgcgtgcgctgaccatcggtcacgtaatcgacctcgccggttaccgcgacaacggtattcagctggcgggccagcgcctgggccgcgggcagcgctgcggcggcggtatcggtcgtatcgacgccgcgcccgccgccgctcattccggccagggccataatttccgacgcattaccgcgaacggcggcaggctgcagcgccagcagctcccggcaaaattctgtccgtaaggtcagcgcgccgaccgccaccgggtccagcgcccatggtttacccgcctgctgcgcgctgcgcgccgccgcacgcatcgccgccgcgcgttcgacggtcagcgtaccgacattaatcagcagcgcatcggcaatggcggcaaactggctggcttcgtccgggtcaataaccatcgccggggatgcgccaatcgctaacaggacgttggcggtaaaggtctgcaccacgtcgttggtcatgcagtgaacaagaggagaatggcggtgaaaaaggtgccgcagatgggcaatatgcgcggggttcagcaggtcagacatcgtttgctcccgccaggcgatgaagaagcgacgaccctgcggtctctgacttccctacgctggcattatccagatcaggtggtacgggtttttctcagccttcacaaagaagggcaccccgagtcattgagagataaaaacgttctcagtgggcaggttacggtaagtcgcgggacaacgcaagccggccaggcgtaggtatacaagcgcgcggcaattcaaaattaacaataagcaatcaaataattaacaaaataaacacttttgcagatacgtgtttatagtttaggaggcgttacaggatgtaacccgacgtcatatcgaaattaacgagtgaatcagcgtaaacccatgaggattccgatgaaattaacaccgattatgaaaagtctggctctggcaggaattatctcgactctccctgtgaccagctgggccgaaacgtcgccgaaagaagccgctgcggcgaccaaacaggcaaacgacgcgctgtataaacagctccccttctccgacaacaccgactttaccaacgcgcataaaggttttattgccgcgcttcctacggaagtgattaaaggtgaacagggcaacgttatctggaacccgcagcagtacgcctttatcaaagagggggaaaaggcgccggatacggtcaaccccagcctctggcgtcaatcccagctcatcaatatcagcggcctgtttgaagtgaccgaaggcgtgtaccagatccgcaacctcgatctctccaatatgaccatcattgaaggtaaagagggcatcacggttgtggatccgctggtatcagcggagaccgcaaaggtcggaatggatctgtattacaaaaatcgcggcaataagccggtcgttgcggtgatctacacccacagccacgttgaccattacggcggcgtgcgcggcgtggtcgatgaagccgatgtcaaatccggcaaagtcaaaatctacgcgccttccggttttatggaagctgccgttgctgaaaatattatggccggtaacgtgatgagccgtcgcgccagctatatgtacggcaacctgctcaaaccggatgccaccggccaggttggcgcaggtctcggcaccacgacctctgccggcaccgtcacgctgatcgctcccaccaatatcatcgagaaagatggccagaaagagaccatcgacggcctgacctacgattttatgctggcgccgggctcggaagcaccgtcggaaatgctgtggtatatcgaagagaagaagctcattgaatccgccgaagatgtcacccataccctgcataacacctactcgctgcgcggggcgaaaattcgtgaaccgctgccgtggtcgaaatatatcaacgccgccattgtgcgctggggcgacaaggctgaaatcattatggcccagcaccactggccgacctggggtaatgagaacgtggttaacctgctgaagagccagcgcgacctgtatcggtacattaatgaccagactctgcgcatggccaacgagggcctgacccgcgatgagatcgccgccaaattcaagctgccggacagcctggccaatacctgggccaaccgcggctactacggctccgtcagccatgacgtgaaggccacctacgtcctctatctcggctggttcgacggcaacccggctacgctggacgagctgccgccggaagaagcggcgaagaagttcgttgattatatgggcggcgccgacgctatcctcaagaaagccaaagaagattacaaccagggcaactatcgctgggtagctcaggtagtcagcaaaattgtcttcgccgatcccggcaatctggaggcgcgcaatctggaagccgatgccctggagcagctgggctatcaggcggaatcaggaccgtggcgtaacttctacctgaccggcgcgcaggagctacgcaacggcgtcgtgaaagggccgacgccgaataccgccagcccggataccgtgcgggccatgactccggaaatgtttttcgactatcttgcggtccatatcaacggcgaaaaagccggaaccgccaaagcggtattcaatatcgaccttggtaacgatggcggtaaatataagctagagctggaaaacggcgtgctcaaccacaccgccgatgccgaagccaaagacgccgacgctaccatcgcgctggatcgcgccacgctgaacaaaatcatcctgaaagaggaaacgctaaaacaggcggaggataagggtgaagtcaaagtgaccggcgacggcgcgaagctggacgagatgctgggctatatggataaatttgagttctggttcaatatcgtgacgccgtaaataagctcccgcggcggccagctgcgggacttaatccgtccggagtttcatttgctttcccctcgccgcaggcacaaaattatcagcaggtatcaccctgcgtcgaggtatcgttatgtccgtttatcaccatgctctggtgctgatcaacagcagccttgacggcgttccgctgctggcgcacgccgcgaaaatggcggaagagaacgctatgcgtattaccatcgcccatatcagcaccgactaccggtcgcttaattatgtctccgacagcctgctggatgatgacgtttcccgggaggtgattcaggccaaagcgctgctcaatgaactggccaccacggtcgccctaccggtgcaaacgctatcgctggtgaccacgcgtcgttttgccgatgtcgaagcgtgcgtgcggcagcggaatattgatttgatcattgccggtcaccacaaccggctgctgggcgttctcgcttcacactccctggagtacattaatcatctcaccgtcgacgtgctgattaagcatcttccctgacagcctctcccgcagacggcgcgctgcgttcgtcgggctcccccccgcgccggtcagcgcagcgaacttagcaataatgcgaaacattcctcaatcagcggcggcaaaggctgcggcccgcgcatcagcgccacggttcgcgtcagcgcgggctgctgaagctgcgccacctttaacgccggatcctgaaggtgggtagtataaagctcaggcagaatcgccaccgccagccgggaacgcaccaggccgtaaagcgtttcaatatagtcaacctgataacgcgtattcagcgtgaggcgatggctctccgccagcgcgccgaccagacgctgaatattgccctttgagaacaccgcgatatcgcgccccgcgagcagcttccacggcagatgcggctgcccggccagcggatcgtcacagtgcagcaccgccacaaacggatcgtcgcgcagaggataaacctgcagctcaggcggtaacgaactgtctattgcgccaacggcaaaatctatctttcccgactgcagctcgcaaaacagggcgtcgttggtctgatcgtgaaactccactctcaggcgcggaaacgcctgggccagcgtttgcggcagcagcggaaacagcagcgagctcaccgagggcaccagcccgatacgcaccgtaccgtcgccgccggcctcgactatctgctgcatatcctgaaacgccagctgcgccacgctcagcacccgccgggcgtggggcaaaattgccgcccccagatcggttaaggtcaccgccgaggcggtgcggttgaccagcttgccgccgagcaccgtctcgatttgccgcagcgcgctgcttagcgccggctggctgatagccagccggttggcggtgtcggtgaagtggcgtagctgggccagggtcacaaagtactggatctgcttaagggagagcgcgggcagacgctgccagggttcagtcatcatgttttcatcaatggtgagcatgcagaataacccgaggttatcgggcgataaatttattcatctgggcaaacgtttgctctgcccctagagtatccccattatccttgtgccggagttgttatgtccagcagtgctgaaacccgccgccgcgccgtgcaggccgcacgcggcgaatccccgttcgatctcttattaaccgacgcgcagattgtcgatatggccaccggagagatccgcgaggcagacgtcgggatcgtcggcgaaaccatcgccagcgtgcacccgcgcggcagccgctccgatgcccacgaacgccgctcgctggcgggatatttcctgtcgccgggtctgatggacacgcacgtccaccttgaaagctcccacctgccgcctgaacgctatgccgaaatcgtgctggctcagggcaccacggcggtattctgggatccgcacgagctggccaacgtgctgggcgtcgaaggcgtgcgctacgccgtcgccgccagccgccatctgccgctgcaggtgatggtcgcggcgccgtccagcgtgccgtcgacgccgggactggagatgtccggcgccgattttgccggcgcggagatggaaaccatgctggcctggccggaagtttgcggcgtcgccgaagtgatggatatgcacggcgtgctgcacggcagcgagcggatgcaggagattatccaggccggtctcaacagcggcaagctgatcgaaggccacgcccgcggtttgcgcggcgcggatctgcaggcctaccttgccgccggggtcacctccgatcacgagctcacctcggcggatgatgcgctggaaaaactgcgcgccgggctgactatcgaaattcgcggctcgcacccttacctgctgccggatatcgttaccgcgctgaaaacgctgccgcatctctcctcgcaaatcaccgtctgcaccgacgatgtgccgccggatatgctgctggaaaaaggcggcattatcgccctgctcaacctgctgattgagcacggactgccggccaccgacgtcctgcgcttcgccaccttaaacgcggcgatccgtctgcagcgtaacgatctggggctgattgccgccggacgccgcgccgatctggtggtttttgattcattagaaaagctcgacgcgcgggaggtgtacgtcgccgggaagctgattgcccgcgagggcgccctgcttgagtcgattccgccggcgccgggtattaccccgccgcgcgataccctgcagatgccgccgctcagccctgacgattttatcctccgcgtcggcgcgattcgccacggcgtcgcccgcctgcggcatattcgcggcgcgcgctttacccagtggggagaggttgaggtgcaggtccgcgatggccgggtgcaaatcccggacgggtttagcctgatttgggttaagcaccgccacggtcgtcaccaggcgacgccgcaaattgcgctgctggaaggctggggcgagctgcgcggcgccatcgccaccagctactcccacgattcccacaacctggtggtgctcggccgcgatgccgacgagatggcgctggcggcaaaccgcctgatcgcctccggcggcggtatggcgctgtctcagcagggaaaaatccttgcccacgtggcgatgccgattgccggaatgctttccgacttgcccgctccggagctggccagacagttccgccagcttcgcgacctgagcgcggaggtcgccgactgggagccgccctatcgcgtatttaaggctatcgaaggcacctgccttgcctgtaacgccgggccgcatttgaccgatttaggtttgaccgacggcagcacccgccagatcgtcgagccgctgatagactgccgggaaatcccggaacacacagaacacaacaataatcatcagggagcctgagcatggccgacaatacccttcattcatccacgcaaggaagctggctggagcgccgttttgccttgtattcccgcggcagcacgctgcgcaccgaatgcctcgcgggcatcaccggctttctcgccgccgcctacctgctggtggttatccccggcctgctggcggttggcgggatggataaaggcgcggcaaccaccggcacgattctggtgttcgtcggcggcacgctgctgatggcgttttatgccaacctgccgtttatcgtcgggccgggcatcggcggctcggtgctggtcggcgtcacgctggcgggcagcgaaggcattggctggcaggttggtcttgggatcgcctgctggtcggggattctgtttttcctgctaaccaaattcggcctgcgtgaagtggtgacccgttcggtgccgcagtcgatcaagctcggcctgacggcctccattgggctgtttgtcgcggtattgggtttccgtaacgccgggctggtgctggctaacgccaaaaccaacgccctgatgctcggcgattttctctcaccgggggcgctggtggcgctatgcgggctgtttctggccattgccctgcaggcgagaaaaatccccggctcaattctgtgggcgattctctttgccaccctggtcggcattccgatgggcgtcaccagactcccgggcagctttatcgatatgccgcattcgctgacgccggtgctggggcaaatcgatatgctgggcgcgctgaatatcgtcttcctgccgttcctgttcgtctttttcgcctcagagttcttttccacgatgggcaccacgctggcggtaggcggcgaagcgggtctgctggatgaagaaggcaatatgccgcatatcaatcgcccgtttatggttgattcgatcgccgcagccgttggcccctggctgggcattccggcggcgaccgcgctgattgaatcctcagcggcagcggaagccggcggtaaaaccgggttaaccgcgctgtcggcggcggtgatgttcctcctgatgctgctgtttaccccggtggcgctgatgatcccgaaagaggcgaccgcgcctgcgctgatcctcattggcctgaatatgttcagcggcctgcgcaaagtggacctggcaaacttcaccgacggcctgccggtgctgatgatggtgatgattacgctgattgccaatagcttcgggaccgggattgccggcgggctgctgttttatgtggtgattaaaacgattgccggcaaatggcgggaaatccccatcgggctgtggatccttgcgattccgctggtctactacttcgccacgctggtgaagcattaagcttcgcaccgatcgttctcccggaggcggcgctggcgcgcctgtccgggctaccaatccgtagcccggctaagcgcagcgcgaaccgggaaaaagccgcgccgatgcatcaccccgacaccgtcccggaggcggcgctggcgcacctgtccgggctaccactccgtagcccggctaagcgcagcgcgagccgggaaaaagccacgccgatgcatcaccccggcaccattcccgagtcggcgctagcggcccgcagagggcgcgcgggaatgaaccgcttcgcacgcctctttcaccgcctcatacagcagccgtaccgcaggcgaaagctgcttgcggtgcgggcaaatcatattcagcggcaccacgtcgccctgatactccggcaacagcacctggagccgcccttcacggatatcatccccgacgtcgagttcagatttgaacgcgatcccctccccggcaaccgccaggcggcgaatcacctccgcatcatcgctcacgatagtgccggcaacctgcacgtaatggaccttcccgtccaggctcagcggccagcgatcgaacgccctgccgcgcagcacgtaggtcagcgcattgtgccgggccaaatcttccagcgtcttcggttcgccgtgttcggctatccagccgggcgaggccaccagcatccggcggttctccggcgcgacgggcagggaaataaacgaggcatcgtcgttatcgccgtagcgaaacgccacgtctaccggatctttaaatacgtcggtccgatgatcggaaaacagtatccgcaggcgcagcgcgggatggcgctggcgaaaagcgcgaaacacgcgcagaagcaagttgcgccccaggtcggacggcacggcaatttgtaacgtaccgcgtacttcgtcatccggcgtgctgattttttgcagccccgcgtgcagcgtatcaagcatctgcgtggcatagggcagccaggtttcgccttccggcgtcaggcgtaaactccgcgtcgaacgggcaaaaagacgaatattcagcgtcgtttccagacgcttgatcgccgcgctcacctgcgcgggctgcagcccggcctctcgcgccgcatcgctgaagctgcttaacgccgcagcgcggacaaacaatgccagatcttccagccggaacatacacactcctcaacccggattattctcaaaacaggcgcgcgccgatgaaaaacggcgctgcatcaccgtttgcttacacttttaaccaaaccaacgcttgccaatcccttgacgtatcaggaatcatacgaggctgcgattttgtgtccaggataataatggggaaattatgcgtaaaacaaaaatgatgcttctgggcgtactgttggcctgcgccagcggagcgtgggcggcgaccggcgaaggtatacagaaatatgagctggatggggtcactgcggacttcaaacaatttcacatcggcgataccgtcccgccgctgtacctcacgccagaatacaacatcaagcagtggcagcagcgcaatttgcctgcgccggatgccgggacccgctggacctatatgggcggaagctacgtgctgattaccgaaaccgaggggaaaatcctcaaaatttatgatggcgagattttctaccatcgctaaaagctgaacgccagcgcgctctccctgccgctggcgtttttttgtggcaaagcgctattcgttaaagcggttctgtttttgcataaattcctcgacggcaatatatgaagcaacctgctcatagagcattaaaatacttaatatcagatcgccaccgctacgcagtaaatcatccggggccgtacgactcttgtcatccgataaaaaaacaatctgttcaaaaatatcactgtactcaccataagcgccaatcggaatctcagctatcgggagatgctcctggcaataacgcaacgcgtctgctgctttctccggcagcgagcgcgtatgcataaaaataaccagtagttctcgtaacttaacgattagagcaatattattcatcatgcactccggaaatgtgtacggctatactttccttccatcgtttttatatacgtattactgataacatccacgtttcgccaaataaaaagccaaaattaaacctcatcacggcgaattaaaatcatacttctttgctattaaagctcgcacaaccgccagaggaaaacaatgttagcaatatgttttattgattaatctcaatatcgctaaatgtgaataaaaataaataatatttaacagcaatattattcgcgcggtgattatctcctcggtagagaaccgggacggaaaaaaataaaaaaccgcacggcgaaaagcgccgggcggctcaggagggtgaggagattagaccgcgcggaaggctatctctccgggaatgacttccccctgccagtacagctgcgccgcgacgcggtcggccagctggcggtaggtctcggtaaactcgctttccggacgcgcaaccaccgtcggcgtccctttgtcgaggtcttcgcgcagagtgatatgcagcggcagctggcccagcagctgggtatgatatttctccgccagcttctgagctccgccggtaccgaaaatcggctcgtggtgtccgcagttgctgcagatatgcatgctcatgttttccacgatacccagcaccggtacctcgactttttcaaacatcacgatgccttttttggcgtcgatcagggcaatatcctgcggcgtggtgacgacgaccgcgccggtgaccggaatgttttgcgccagcgtcagctgaatatcaccggtgcccggcggcatatccagtaccagataatcgagatccggccacagcgtttcctgcagcatctgcatcagcgccttgctggccatcgggccgcgccacaccatggcgttgtcgtcggtcaccagataaccgatggagttggtagcgagaccgaatttcataatcggcgccatatgggtgccgtccggcgaagtcggacgctgatcttccgcgccgagcatggtcggaatcgacggcccgtaaatatcggcatccagaatgccgactttcgccccttccgccgccagcgccagcgcgaggttgaccgccgtcgacgatttacccaccccgcccttgccggagctgatggcgataatgtttttcacgccgttgatgcccggctgattttttacccgctgaagcgtggcgatgctgtgcgtcagcttccagtcaatggctttggcgccggtaatgcgcagcagctcggcgctgcactgctccttcagcgcttcaaacgcgctgttccagacgaacggcatctgaatttcaatgtgcacggtctcgtccagccaggcgacgtgatgcagcgccttcagcgtagtgaggttatgtttcagggttgggtgctggaaattagccagggtcccggcgaccatcgcgcgcagacgctcgggggatttggcctgggattgcgaactcatcccgactcctttgttattgtgagttgaatcttgtgcgttaagtttaccttaaagggaataattcccccaccataagctttgggcttaccaaattattgcctttgcggtaacatcaaaacccctttttacaatagaagatgtaatgcccactatgactcaagtcgcgaagaaaattctggtaacgtgcgcgctgccgtacgcaaacggctcaatccacctcggccacatgctggagcacatccaggctgatgtctgggtccgttaccagcgaatgcgcggccacgaagtcaacttcatctgcgccgacgacgcccacggcaccccgatcatgctgaaagcgcagcagctcggaattactccggagcagatgattggcgaaatgagtcaggagcatcagaccgattttgctggcttcgacatcagctacgacaactaccactccacgcacagcgatgaaaaccgcgagctgtcggagctcatctacacgcgcctgaaagagaacggttttatcaaaaaccgcaccatctctcagctttacgatccggaaaaaggcatgttcctgccggatcgctttgtgaaaggcacctgtccgaagtgtaaatcaccggatcagtacggcgataactgcgaagtgtgcggcgcgacctacagcccgaccgagcttatcgagccgaaatcggtggtatccggcgcgacgccggtgatgcgcgagtccgagcacttcttcttcgacctgccgtcgttcagcgaaatgctgcaggcgtggacccgcagcggcgcgctgcaggagcaggtggcgaataaaatgcaggagtggttcgagtccggcctgcagcagtgggatatctcccgcgatgccccgtacttcggcttcgaaatcccgaacgcgccgggtaaatacttctacgtctggctggatgcgccgatcggctacatgggctcctttaagaacctgtgcgacaagcgcggcgacgccaccagcttcgacgagtactggaagaaagactctaccgccgagctgtaccactttatcggcaaagacatcgtttacttccacagcctgttctggcctgcgatgctggaaggcagcagcttccgcaaaccgaccaacctgttcgtacacggctacgtgacggtcaacggcgccaagatgtccaagtcgcgcggtacctttattaaggccagcacctggctgaatcattttgacgccgacagcctgcgctactactacaccgccaagctctcgtcgcgtatcgatgatatcgacctgaacctggaagacttcgtgcagcgcgtcaacgccgatatcgtcaacaaggtggttaaccttgcctcgcgtaacgccggtttcatcaacaagcgtttcgacggcatgctgtccgccgagctggccgatcctcagctgtataaaaccttcaccgatgcggcagcaagcattggcgatgcgtgggacagccgcgagttcgggaaagccatccgcgaaatcatggcgctggccgacgtggcaaaccgctacgttgacgaacaggcgccgtgggtggtcgccaaacaggaaggccgcgacgccgatctgcaggccatctgcaccatgggcctgaatatgttccgcgtgctgatgacctggctgaagccggttctgccgcagctggccgcccgcgccgaagcgttcctcaacggcgaactgagctgggatgctatccagcagccgctgctcggtcacaaggttaacgcctttaaagcgctgtataaccgcatcgaaatgaagcaggttgaggcgctggtcgaggcgtcgaaagaagaagtgaaagcgctgtcagcgccggtcaccggtccgctggcggacgatccgattcaggaaactatcacctttgacgatttcgccaaagtggatatgcgcatcgcgctgattgaaaacgccgagttcgtcgacggttccgataagctgctgcgcctgacgctggatctcggcggcgagaagcgtaacgtcttctccggcatccgctccgcctatccggatccgcaggcgctgattggccgcctgacggtgatggtcgctaacctggcgccgcgcaaaatgcgcttcggcatctctgaaggcatggtgatggccgcaggtcctggcgggaaagatatcttcctgctcagcccggacagcggcgctcagccgggccagcaggtcaagtaaggctgtataaagcgctgctccggcagcgctttttttttagagcgccacgatattgtcgacgacatcgcccgccgggtgctggcgcagaaagaagaaaacgctggcataggcgcgaaacggcgacttccgaggatacgcccggcaccatcgcccaattctgtatacaattagagatgatgattgattaacaaggaatgataatgaaatttaaccgcaggatgaccgccgctctgggcgccacgctattgatggccgcgcttgtcggctgcgataacaacaaagatgaggtcaaaacgtttaacaatacgatcaacggcgttgatctgacctacatctatcactataaaggcgatgtcgtcacccgccaggacgcggagaatactatcccctatcaatcactcggggtaagtaacgaagagcaggcgcgcaaggtcatcgaccctatcggcgcggcctacagcaaaatcaaaggcgttacccacagcgtcgactataaagagaacgtcgcgcaggaacacctctccatcgacttcaatcaggctaaaatcagcgagctgtgtcacttgccgggggccagtttttccgactgttcacaaaagttcatttcgctgagcgagtcggagaaattgctgaaatcgcagggttttaaagaagtgaaacagccctgactggtgcggactactcccggcttgcgctgcgctgagccgggctacggagccgtgcgttcagtagcccggctcaggcgtttacgccgcaagccggggaggcatatcaggatttcgcgtgttcgcgctcggtcagtccgcgcagaaagtagcgcaggaactggtcgccgcattcgcggaagtttttatgatccggggcgcgcatcatggcggtgatttccggcatggagacgcggaatttctgctgggtgaggatagcgagaatatcatccgtcttcagggagaaggcaatacgcagctttttcagcacgatgttattattcacccggcgttcgaccgccagcggcggcgccgacgcatctttaccgcgtttgtcgtaaatcaggccgttgaggaaattcgacagcacgatatccgggcagcgcacaaacccctcttcgtcttcttttttcagccagggaaccagctgttccgcgctgaccggcgcatccgccagggcaaaaatacgaaccaggccgctgttattggttttcagggtgtagcgcaggctacggagaatatcgttactgatcatattgccttcatgatgaaaaaatctgccgctaagtctatcacgattccgccgttttacagcccaatcgcctctttcaggctcttcaggtagcggcggctgaccggcaccgtttgcccggcgcgcatcagcagctccgcctggccgttctcctcaaagcggatctccttgagatgggacatgttgaccaggtactgacgatggcagcgcagcagcggcgttcggctctcgagcgtgcgcagggtgagctcggtaaagccctccttcccttcgcggtcggtcacgtaaatcccgctcatccggctgctgacgaaggccacgtcttccatctgcagcagccagatccggctgtgtccggtgcagggaatatactttagcgcctgctgggtatcgtcgagcacggtgatatcctgcaggctgcgctcctggcgcaggcgaaacagcgttttttccagccgggcggactcaatcggcttcagtaaataatcaaacgcgtgctcttcaaaggccttcaccgcgtactcgtcaaacgcggtaaggaagacgatatagggccgatgctgcggatcgagcatgccgaccatctccagaccgctgatgcgcggcatctggatatccagaaacagcacgtccgggcgcagcttatgcaccgcgccaatcgcctcgacggcattcccgcattcgccaacgatctcaatatcaggctgggtctccagcaaaatacgcaggttttcacgcgccagcggctcgtcgtcgacaattaatacttttaacatgcgctttcctccagaggcagtctcagcgtgacgcgggtaaaacattccggctcgcaggttacggtgatcccgcagtcggtgccaaagcgcgcccgcagtctgcggtcgaccaggttcatgcccagcccgctggcgctgggtttgtcctgatacagcccggcattatcttcaatatccagctgcagccagcgctcttgctgactggcgcggatagtgatttcgcccaccccaaggtgctgcgaagtcccgtgtttaatcgcgttttcgacgattggctgcagggtaaacgccggtagctgatgctgccccagcgcctcgggcaccagcatatgaatctgcaaattggtctgaaaacgcgctttctcaatctgcaaataggcgttcacatgttcgatctcatccgccagggtcacgatctccgctggccgcttcagatttttgcggaaaaaggtcgacagatactgcaccagctgcccggcctggtcgctatcgcggcgaatcaccgctttcagggtattcagcgcgttgaacaggaagtgcggattcacctgggcgtgcagcagcttgatttccgactgcgtcagcagcgccttttgccgctcatactgtccggccaggatctgcgccgacagcagctgcgcaatcccctcccccagcgtgcggttgatggagctaaacaggcggtttttcgcttcatagagtttaatggtaccgatgacccgctgattttcgccgcgcagcgggataaccagcgtcgagcccagcttgcagttcggatgaatcgagcagcggtaaggcacctcgttgccgtcggcgtaaacgacttcgccggtatcgatcgccttttgggtatagagcgaagagatgggtttgcccgggaggtggtgatcgtcgccgatcccggtaaacgccagcagcttgtcgcgatcggttatcgccaccgcgccgatatccagctcctggatcagcacctgcgcgaccttcatgctgttctcttcgttgaacccctggcgcaggatcccctccgtcgaagcggcgaccttcagcgccgtagccgaaaaggccgaggtatatttttcaaacattgctcgcttatccagcaggatgcgcataaatagcgccgccccgacggtgttggtgaccatcatgggcgcggcgatgctttgtaccagatgcagggcatcttcgaacgggcgagcgataagcagaataatcagcatctgcaccatctcggcgaaaaaggtgatcgcgccggcggtgagcgggctgaagactttgtccggccgcccgcgtttgaccagaatactgtgtaccagcccgccgagtagcccttctacgatggtggataccatacagctcagcgcggtcatgccgcccagcgagtagcggtgaagcccgccggtcagccccaccaggccgccaaccaccggcccgcccagcagcccccccatcaccgcgccgatggcgcgcgtattggcgatcgagtcttcgatatgcagcccgaagtaggtaccgaggatgcagaaaatggagaaggttacgtagcacaggagcttatgcggcagccggacggtgacctgcattaacgggatgaacagccgcgttttgctcatcagccacgcaatgaccaaaaacacgcacatctgctgaagcagcagcaacaccagatcaaactcgtacatacccgcagaccacacttcatttgaaagcgcgtaacatacactgcttgcttataactttctttgaagcaatacatgaaaatgataattcatgttcaggatcacatttcttcgcgtctcgccggcccagatttgtacaaaaaacagacaaaaattcccgcttcggcaaacagcttctacagttaatggaggagaacacagcgggaggagaaaatggcgctttatacaatcggcgaagtggcccagctttgcgatatcaatcccgtgacgttacgcgcctggcagcggcgctacggattactgaaaccccagcgtaccgacggcggccaccgcctgttcaacgaatatgagatagaccggattcgcgaaattaaacgctggattgactccggcgtgcaggtagggaaagtgaaaacgctgctgatggataatgagcaggaggtggccgacggctggcgcaagcagcaggaaattttgctcggttatctgcaaaacggtagctatcatcgcctgcgtatgtggcttaaggagcgcaaccacagcgagtcagcgcaaattctggtgaagaatctgattaatccattacgccagcgcctgcttagcccgcagcccacgctgctggcgctgcggggcatccttgatggtattctgattaatcatatcgcccgcactctttcatccacggcaaaatatcccggcagccatgcgctgattatcggctggaatgtgaatgatatcacccggctatggctggagggctggatagccagcgaacagggctggcgggtggacattctcgcccattcgctgaaccagctccgaccggagcttttcccggagagtacgctgatggtctggtgtggagaagcgccctgtagcacccaggtcaatcaaatgcgcctctgggagcagcaggggcagattatctggctgaatcacgccaccgccacgtctcccggaggcggcgcctgacgcgcctgtccgggctacgggttaccggcaatctgtggccgggtaggccgactaagcacagcgcaagccgggtagaagccgcagcaatgctacgtcacggcatattccccgggttgcggcgtaaacgccttacccgggctacgggcccgcagacggtgatgaaccgaagcccggctaagcgcagcgcaagccgggtagaagccgcagcaatgctacgtcgcggcacattccccgggttgcggcgtaaacgccttacccgggctaccggcccgcagacgttgatgaaccgtagcccggctaagcgcagcgcaagcgggtagaaaccgcagcaatgccacatcgcggcacattccccgggttgcggcgtaaacgccttacccgggctaccggcccgcagacggtgatgaaccgtagcccggctaagcgcagcgcaagccggggggttgtcgtagctaaaaagcaattaatgttttattaacacctgcgcttcaccgtataatccctgcgttaacatcaggagcctattatgaagccagcgaaaattgcggtgattaccctgttcttatttatggccatcagcggcatcggcggcgtgatgctggccggttattcatttattgttcgcggtggtgtcggctgattcgccggttcagccgttcaaacccccggtcgacgataatcgccgccagcgccaccagcagcgccccctgaatcacataagcggtattaaatccgctgaggccgataacaatcggcgtgccgagcgtattcgcgccgacggttgaagcaatggtcgccgtaccgatattgacgatggtcgaggtacgaattccggccagcatcaccggcgccgccagcggcagctcaacttttatcagcctctgccagccggtcatccccattccctgagcgatagctaaaacaccggacggtaccgccccaatcccggccagcgtgccctgcaaaaccggtaagatgccgtacagcaccagcgcaataagcgcgggctgccagccaaaccccatcaccggaaccgcaatcgccagcaccgcgaccggcggaaacgtctgccccattgcggcaatcgtctccaccagcgggcgaaactcatgccccgccggacgggtgaccgcaatcccggcgacgacgcccaccaccgtagccgcgaggctggagagcgccaccagccaaaagtgcgccagggtaagagaaacaaaactctcctgttgataaaccggacgcggcagttcgggaaacagcgcgctgaacagcggcgcgctgtagggcaacgccagcagcagcgcgataaacatggcgctgagccacagcagcggatcacgcagcaccttcacgccgggcctcctcgcgcagcaggtcggcaaaatgcagcgtcccgcaggcctctccctgctcatcgaccaccggcagcacctcgcggcgatgagcaacgaactgcgacagcgcctcgcgcagggtcatcgtcacgttcaacgcgtcccccgccaggcgctcatcgcggcgcagataatcactcacgccgcgtagcgacagcaggcgcacgcccagttcgctacggccaaagaacgtctccacaaacgcattttttggctccagcagcatctgcaacggctcgccctgctgtaccacttcgccgccgtccatcaacaccagatggtccgccagccgcagcgcctcatcgatatcgtgagtcaccagcacaatagtgcgtcccagcagacgatgaatgcggatcatctcctgctgcaaggcttcgcgcgtcaccggatcgagcgcgccgaagggttcatccatcagcagcacttccgggttggccgccagcgcgcgcgccacgccgacgcgctgctgctggccgccggaaagctgatgcgggtagcgttcgcgcaggcccggctccagccccagcaaggccatcagctcatcgacccgcgcctgggtcttctgccgcgaccacttttgcagctgcgggacggtggcaatgttctgcgccaccgtccagtgggggaacaggccgatggactggatggcgtagcccatcctgcggcgcagttcgagcaccggctgctggcgaatatcctgcccggcgaaacggatcgtcccgctgtcgtgctccaccaggcgattaatcatcttcagcgtggtcgacttccccgagccggaggtgccaatcagcaccgaaaatgccccctcgcgcagatgcagattgaggtttttcaccgcaggctctccggcaaaggctttattgacgccgtcgaactcaatcacgggcctctcctttcagtaatgcgccccacagcgcgaataacgcatccaccaccaccgccagcgcgatggtcgggataacccccagcagcaccaggtccagcgcgctgctgagcagcccctggaaaaccagcgcgccgaagccgcccgcgccaatcagggccgccaccaccgccatacccacggtttgtacgctgaccacccgcaggctgcgcaacaacaccggcaacgccagcggtagctgtacctgacgaaagcgctgcccgccgctcatccccatcgccgtcgcgctctccagcgcttcgcgcggcacctgctgaaggccgatcgtcaccccgcgcaccagcggcaatagcgcatacagcaccagcgcaatcagcgccggcgtgatgccggtgccggaaacgccgagctgcgccagcgacggaaactggcgcgccagcccggccagcggcgcaataagcaggccaaaaagcgcgacggagggaacggtctgaatcacgttgagaacggcaaaaaccggcgattgccagcgggggtagcgccagagccagacgccaacgggcaagccaatcagcagccccggcagcagggtccccaacagcagcgtcacatgctgggacagcgcatcgtcaaacacctcgcggcgattgaaatactctttcagcaaagagaggccatcgagcgcgccgagtcccagcagcagcgcgggcagcagccagacctgcgcgttcagcagccagcgccacagggctcgggtcgtcaggcgacgaacggcatcgctggcgataagcaggcacagggccagcgccagccacaggccgcttcccggcgaggtgcgggccagcggagaaccgctctgagccagctgtaccgccgcactgccggctccccatagcaataaaggcagcagcagatccgccagcaggaagataaccagcagcgggagacgcccgggacgccagctcagcagcgctatcagcagccctgccgccccctgtacgcccgccagccacggccagacctgccatagccagcgcccctcgccggataacagccggttaggcgcatagttgataaacggcagcgccatcgccagcagcaggaggaatgccagcagcagcgcaacccggttacagcaacgagtggtcacgcgcgccctacttaagcagccctttctgttgcagatagtcggcggcgactttcttcgcatccaggccctcaaccgcaatactggcgttcagcttttgcagcgtcttttcatccaggctggcgaagaccggctgtagccagtcggctatctgcggatacgcttttaacaccgcttcacgtacgaccggcgtgggcgcataaatcggctgcacgcccttcgggtcgctcagggtttgcagacccagcgcggcgaccgggccatcggtaccgtaggccatcgccgcattcacgccggaggtttgctgcgccgccgctttgatggtgaccgccgtatcgccgcccgccagcgacagcagctgattttgcttgagcgtgaagtcgtaggctttttcaaacgccggcagcgcgtccggccgttcaataaattccgccgaggcggccagcttaaagtcaccgccctttttcagatagccggcaaggtcgcttaatgaggcgaggtggtttttctccgccagatcctgacggacggcgatagtccaggtgttgttggccggagccggggtaagccagacgagcttattcttttccgcatccagctttttaactttttcatatccctgctgcgcgtttttccacgccgggtcgttctcctctttgaagaagaacgcgccgttgccggtatattccgggtaaatgtccagctcaccggcggttatcgccccgcgcaccaccggggtggtgccgagctggattttattgacggttttcaccccatggctttccagaacctgcaaaataatattgccgagcagcgccccttcggtgtcaatttttgagccgaccttaaccggctccgccgcctgcagcggcaggcttatcagggccgccagcgccagcgtgccggaccacattcttgccttaatcatcctcgcgtccctctttaatttgcgctccattaacaggagcttaagcaaaaagcgtagttcatttggggcggagcggaaaaagaaaaggccgataaatcggcctttggggtaaggaatgcctgttcccgggtggcggccgcagcctcacccgggcgacaaatcaccattacagcagttcaaactcgctctgcttcacgcgggcggagtcgacgccgataaagacgttgaatttacccggctcggcgtcgtacttcatctgctggttccagaacttcagcgcttcaacgtcaatcgggaagctgacggtttgcgtctcacccggcttgagggtcacctttttaaagccgcgcagcattttcaccggacggctcatggaggcggtaacgtcctgcagataaagctgaatcaccgtcgccccttcgcgcttgccggtattggttacctgcacgctggcggtcacgctgccgtcgcgctgcaggatcggcgccgacatttttacgtcggaaacgctaaaggtggtgtagctcaggccgtagccaaacggatagagcgggccgttggcttcatcaaagtagcgcgaggtgtacttgttcggcttatccgcattgtacgggcgaccggtgttgagatggctgtagtaggtcgggatctgccccaccgagcgcgggaaggacatgggcagcttgccagacgggttgtagtcgccgaacagcacatcggcaatggcgttgccgccttcggtaccggcaaaccaggtttcgaggatcgcatcagcctgctgatcctctttcaccagcgccagcgggcgaccgttcatcagcaccagcaccagcggtttaccggtcgctttcagcgcgctaatcagggcgcgctggctcggcggcagggtgatgtcggtgcggctggaggcttcgtgggccatgccctgcgcctcgcccaccacggcaactaccacgtcggactgcttcgccgccgccacggcttcgtcaatcatctcctgcggcgagcgcgagtcaacctgcaccgctttctcgtacagattgaggaagtcgacgatgcctttatcgtcagtgacgttagcgcctttggcatagataatcttgcctttgtcgcccagcgcgttctgcaaaccggtcagcacggtgaccgactgatcggccacgcccgccgccgaccagctgcccatcatgtcgcgcttgctgtcggccagcgcgccgattaccgcgatagtgcccgattttttcaacggcagcgtatcgaggcggtttttcagcagcaccaggctttcgcgcgccacttcgcgcgcttctttgcgatgcaggcggctttcggcgttggtatcctgcggatcggaatctttcggccccaggtggctatacgggtcgttaaacaggcccatatcatatttcacgttcagcacgtggcgggtcgcgtcatccagctccgccatcgtcaccttaccggacttcaccagtcccggcagatacttgctgtagtactcgtcgctcatgctcatattgatgccggacttcagcgccacgcgcaccgcgtcttccgggtccgacgccacgccgtgtttgatcagctctttgatagcgccatggtcggagacggtgatgcctttaaagccccactggtcgcgcagcacgtccttaagcagccaagcgtcggaggtcgccggggtaccgttgagcgagttgagcgccaccataaccgcgccgctgcccgcatccagccccgctttgtagggcggcatatagtcgttgaacaggcgctgcgggctcatatcaacggtgttgtactcttttccgccctcgaccgcgccgtaggcggcaaagtgcttgacgctggtcatcaccgaatagcgatccgccgggcttttcccctgcatcgacgccaccatcgccctgcccatctcggtggtcaggtaggtatcttccccgaacccttccgaagcgcggccccagcgagggtcgcgggagacgtcgaccatcggcgcccaggtcatgttcaggccatcatcggccgcttcgtaagccgacacccgcccgacggtgttcaccgcgtcgaggttaaaagaggaggccaggccaaggctaatcggaaagacggtacgctggccgtggagcacgtcataggcgaaaaagagcgggattttcaggcggctgagttccatcacctgatcctgcataatgcggatatcgtggcgggtcacggtgttaaaaatcgcccccacctggccttctttgatcatctcgcggatggcctctttcgggttatccgggccgacgctaattaagcgcagctgaccgattttttcatccaccgtcattttcgtcagcagttccgtcacaaacgcatcccgcgcctgcggcgttaggggatgattgccgaacaattcatccgccagcgccggttgcagcgccaggctcacagcgacgcctacagtacaaagccatttcatttttatccctcattgttccagtcgaccagatcggcgaaaagatagcaaaaatcgaagtctgccataaacataaacgagacgcctgaataaagcgcgcgttgttctctgatttttcgaaacattgatgcatcaaattgtcatacaaagcgctattcttatttttgataattttgtaccaccacaaggagtggaacatgtcatctgcaacaacctataacaacgcttttctggctgaactcgcccgtctggtcggctcgtcccatctgctcaccgacccggctaaaacccagcgctaccgtaaaggctttcgctccggccagggcgacgcgctggcggtggtctttcccggtaccctgctggagctgtggcgcgtgctgaacgcctgcgtcaacgccgataaaatcattctgatgcaggcggccaacaccggcctgaccgaaggctcaacgccgaacggtaacgattatgaccgcgatatcgtcattatcagcaccctgcgcctggataaactgcatctgctggataaaggcgagcaggtgctggcttatcccggcacgacgctctattcgctggaaaaagcgctgaagccgctgggtcgcgaaccgcactcggtcattggttcatcctgtatcggggcatcggtggtcggcgggatctgcaacaactccggcggctcgctggtacagcgcggcccggcgtacaccgaaatgtcgctgtacgcgcaaattgatgaaaacggcaagctgacgctggtgaaccacctcggcattgacctcggcaccacgccggagcaaatcctcagccgcctcgacgacgaacgggttaaagatgaagatgtccgccacgacggtcgccacgcccacgatcatgattacgtcacccgcgtgcgcgacgtgaatgccgataccccggcgcgctacaacgccgacccggaccgcctgtttgaatcctcgggctgcgccggcaagctggcggtgttcgccgtgcgcctcgataccttcccggcggaaaaacgccagcaggtgttctacatcggtaccaaccgcccggacgtgctgaccgaaattcgccgccatattctcgccgagttcaaccatctgccggtggcgggcgagtatatgcaccgcgatatttacgacatcgccgagcagtacgggaaagacaccttcctgatgatcgacaagctcggcaccgataaaatgccgttcttctttaccatgaagggccgcaccgacgcgatgctggagaaagtgtcgctgtttaagccgcacttcaccgaccgctttatgcaaaagctgggtcacgtcttcccgtcgcatctgccggagcgaatgaaaacctggcgcgataaatacgaacaccatctgctgctgaaaatggcgggcgacggcatcgaagaggctcaggcctggctcggggaatatttccagaatgccgaaggggatttcttcgtctgcaccgcagaagaaggcagcaaagccttcctgcaccgctttgccgccgcgggtgcggcgatccgctaccaggcggttcacgccgatgaggtggaagatattctggcgctggacatcgccctgcgccgtaacgacaccgaatggtttgagcatcttcccgccgatatcgatagccagctggtgcataagctctattacggccactttatgtgccacgttttccatcaggattacatcgtgaaaaaaggcgtcgatgcccacgaactgaaagagaaaatgctggtgctgctgaaggagcggggcgcccaatatccggccgagcataacgtcggccatctgtatgaagcgccggaaagcttaaaacgcttctatcgcgaaaacgatcccaccaacagcatgaacccggggattggcaaaaccagtaagcaaaaatactggggagaagcgcaggataaaccgacgagcgcgaccgaaccgcaataatccgcacgggggactgttcagccgcggggcttctgtattacgctgcacgccggagaaatttcctctccggcaaacccgtttaaggaattaatccatcatgtccgcagtggataagctatacgacgctgacttagagatccgcgaagcgctgcccgatgacgcccacgctatcgccgcgctgtacgtctggcacgtgctcaatggacgcgcctcttttgaagagatcccgccaaccgtggatgagatgcgcaagcgaatcaaaaccgtgcgcgatagcgggctgccgtggctggttgccctgtggcgcggcaccatcgtcggctactgctacgccaccttttaccgcccgcgtccggcctaccgctacaccctggaagagtcgatttacgttgaggcgggaatggggggacgcggtatcggcagcgccctgctctcgcggttaattgagaaatgcgaacagggaccgtggcgacaaatgctggcgattatcggcgatggccacagtaacgccgggtcgattgcgattcataaaaagttcggttttagcgtggcgggtcagctgcgcagcgtcggctataagatgggcgactggcgggataccttgattatgcaacgcccgctcggcgatggcgactggacgctgccggagtaaccccccggctcgcgctgcgcttagccgggctacggtacagcgcggttcggtagcccggataaggcgtttacgccgtaatccggggaaatgggggttaatcgttctgcgcggtctgcgcgccgcctttcagcatcgcatcggccatctgcgcttcacgctgctttttatagctgagcgcggaagccggaaccggcatcacttttcccgtttcaatccacgttctcaggcggctggcatcggcgaagtgggtatatttgccaaacgcatccatcaccaccagcgccaccgggcgctgattaatcaccgtacgcataatcaggcagtggcccgccgcgttagtaaagccggttttggtcagctgaatattccagttatcgcggtagaccagatggttagtattgcggaacggcagcgtataggccggatgggcgaatgtcgccatatcttctttggtggtgctcagctggccaatcagcggatactgctcgctggcgatcagcagcttagtcagatcgcgggcggtagagacgttatgaatcgacagaccggtgggctcaacgtagcgggtgcgggtcatccccagcgcctgcgccttggcgttcatcgcgcggataaaggcgtcatagccgcccggataatggtgcgccaggctggcggcggcgcggttttccgacgacatcagcgccagcagcagcatattgcggcggctgatttggctgttcagacgcacccgtgaatagatccctttcatttcaggcgtctggctgatatcaacggtcagcatctcatccagcggcagatgggcatcaagcaccaccatcgcggtcatcaccttggtgatcgacgccatcgggcgaaccaggtccggctggctggcatagatgatttttttgctggcaaggtcgacgatcatcgcactgccggaagcgatatccggctgggaggcggtcaccgccgtggaggttttagccaacgcctggggcgcaaaaggcacagccagcagcaacgtcaggctgagcaaagaaactcgaaatttggtcatcgtgaacattctgaaaagtatttttgcacgttatgaacgtacgccgcggcgctggggtgatgacgccgctggcaaaaatcatcataccttgtcagaacgcgagctggctaataagaatcgtgaacaaatgctgcattgccgacataaaaatctatttatgccggcaatgagttaaatcagaagagcctatatccgtatccccagagaataacggtaatcgccaacagcacttccagcaccagcacccctatcgccagagtcgagctggcgaagctcaacccctcttctttgttgatccccaggaacgtgggaataccgagatacagcagatagccggtgtaaagcagcgcgacggtcccgaccagcgcgcacagccacaccagcggatagagcgccacgagcccgctgaggaaaagcggcgtggcgacatagccggcgaaaaccatacagcgcttaagggaaggccgctgcggatagcttcgtgccatccaccagataacccgccccatcaccgcaaccccggcgagcatcacggcgtaaaacagcaccgccagggccagcccggtcatcagcgacagttttaccaccgtgccgtcgccgaagttccagcccagctgcgtggtgccaataaaggcgcagataaccggaaccgccgccatgaccagcacatggtgcgtatagtgatgcgaaacggtttcgttttcgcttttaataacgctcatctcttgattaggatgagagaagagcccccagacatggttcatagcgtcccccttgtcacggcgtggtacagcactgatccaagtataattcaccttatagattattttgtgtacagcgagaaaaatgcgcttcccccgcatttttatcatcagggtgtatgattaagggactgacgttttatggagttaatctttatatggatatcaataacctgatttcccagtacggctacgcggcgctggtcattggcagcgtggcggaaggcgaaaccatcacgctgctcggcggcgtggcggcacatcagggattattgaagttctggctggtggttatctcggtcgccctgggggggatgattggcgatcagctgctttatttactcggcaggcgctttggcggacggattctgcggcgattcgcacgccagaaaaagcggatccaaaaggcccagcggatgatccagcgtcgcccctacctgtttgtcatcggcacccgctttatgtacggctttcgggttatcggcccgctgctgattggcgccagccgcctgccgccgaaggtgtttctgccgctgaatattgtcggcgcgattatctgggcgttaatttttaccacgctcggctatctcggcggggaagcgattggcccgtggctgcatcatctggatgcgcatctgaagcactggatctggctgattctggcggtggtgctggtggttgcggcgcactggtggctaaagcgccgcgaggcaaagaagaaagagtgacgagagttcccggatggcggcgtaaacgccttatccgggcgacaaccccacagatcgcatgggcctgtagcccggctaagcgcagcgcgagccggggaaacagaactacttcgccgcctgatgatacccgccgcccagcgcggaggtcagctggatgctggcatcaagccactggccgtgcaggcgcagcgcggtgacgcgctcctgcagcgccggcagcttcgccaggctgacgcgcgagccggaaataatcccggcgttcatccgcgcctgcgccagcgcgaccatccgctgagcatctttttcaacctgccgctgctgctgatttttcgccatcagcgtttccatctggctggcggttttcgccacctgattaaccgcatcgaccaccgctttgttgtacttcgctatcgacagggcattttgcgcgctggcgatatccagattcgcgttcaggcggccgctatcaaagatcggcagggtcagcccggcggtgacgcccatctgctgggcagagtggcggaacagatcgctgagatgcagggcatcctgctgcaggaaggccatcaggttgatatccggataaaacgcggctttcgcggcatcaacttcgcttaatgaagcctcgatataccagtgggcgacctgcaggtccgggcgtcgcgccagcagctcatagcccagctggttgggcatttgcgcgctgacggcgggtaaatccgccggatgaagattcagcgcctggctctggctgttggtcagcgccatcagccgcgcttcaatctccttcatattgcccgccacgtcggcgagctgctgatcggttttactgacgttaatatcgttctcggccccttcggccgagttggtgatcccgcgttgatacagcgcagtatccacggtaacgacattattctgttcgcgcttcacctgcgtcagcacgtttttaatggccgcttcggtctgccactgccagtaaaggcgggcgacgctgccggccagcagttcgcgggtctgggcttcttcggcgacctgggctttgacttcaccgatgcgcgctttaagtagcgcgcggtttttaccccacagatccagatcccatccggcggtcagtccgaaggtgccgttggtgtaccacggcccggtattgccgtcggtatcggtggcaaacggccccatcagcccctcggaggacattttctgccgttcaatatcggcggaaaaatccaggttcggccccaggctggattgcgacatccgcgcctgcgcttccgccagcctgatgcgctgttcggcaatctgcatgtccggcgcattggctaaggcacgctgaatcaggctattgagctgagggtcatggtaatcctgccaccagttgctctgcggccagccgtttttcacggcggcgggcagttccgttgcgacgtgggatgccggggtttgctgctggagcggcttgccagtatcgtgcgatggcgcgcagcccgccagcgcgataaccagtggcaggccagccaacgcgcgtatgctcaaagtcaggttcatgaaatcggtcagatgattaaataaggtcgggtatattaagctacttgcatcctagccgtttagtaaagcgtgtgccgtaactattagcagactaaaaataaacttctcatggagtgacaatgagtcagaacatctatgacgatcccgctttttttgccggatacgccaccctcgaccgttcagtcaaagggctggaaggcgcgcccgagtggccgacccttcagcaaatgcttccgccattatccggtttacgggtcgtcgatcttggctgcggctacggctggttttgccgctgggcccgcgatcggggcgccgcgcaggtggacgggctggatctctccagtcgaatgctggagcgcgcccgcgaaatgacggagggcgaaggtatccgctatcgctgcgaagatcttcagacgcttaccctgcccgccgatagctgcgagctggtctatagctcgctggcgctgcactatctgcccgacgtggcgccgctgttcgccaccgtttaccgggcgctaacgcccggcggtacgctgctgttctccgccgagcatcccatctataccgccccgccgcgtcagggctggcaggtggatgagaacgggcagaaaagttggccggtgagccactaccagcaggagggcgagcgcatcagcaactggtttgccgacggggtgaaaaagcagcaccgcaagctttccagctggataaaccagctgatcgccgccggttttatcatcgatcatctggatgagtggggaccgacggcggagcagattgccgctcagccggcgctggatgaagaaaaagagcggccgatgatttttctcctgcgcgcgcgcaagccggcgtaataggcaaaaaggcccggaagttatccgggccataaggctgatgttagcttcgtgctcagggcattactcttttaagctgccgccgttggtggcgattacctctttataccaccagaagctcttcttgcggctgcgcgccagggtgccgttgccttcatcgtcgcgatcgacgtagataaagccatagcgtttggacatctccgccttcgacgcgctcaccaggtcgataggcccccagctggtgtagcccatcagctcaacgccgtcctctattgcctcacgagcctgcaccagatggtcgttaaggtagctgatccggtaatcgtcgttgatgctgccgtcggcttccaccttatcctttgcgcccaggccgttttccacgataaacagcggcttctgatagcgatcccacagcacgttcagcagcgtgcgcaggccaagggggtcaatctgccagccccactccgagcttgccaggtgcgggttcggcaccatgctgagaatattgccgcgcgattttttgttcagctcttcgtcggcggtcacgcagccggtcatgtagtagctgaaggagataaaatcgacggtctctttcagggcttcgcgatcggcatcggcgatctcaaggctaatgccgttgtcgcggaaatagcgcagcatatagcccgggtaagcgccgcggcactggacatcgccaaagaactgccagctgcggttctgctgcagggtttcaaaaatatcgtccggtttgcagctcagcggatacatcaggccgccgagcagcatgttgccgattttgccctcaggcacgatgtcatggcaggccttagccgccagcgcgctcgccaccagctgatgatgaatggcctggtagacttcagctttgctgctgtcggccggcagaccgacgccggtcatcggcgcgtgcagggacatattgatttcattaaaggtcagccacagtttgaccttcgcctggtagcgcgcaaacaccgtacgggcgtagcgttcgaagaagccaatgactttgcgattgccccagccgccgtagtttttcaccagcgcccacggcatctcatagtgggacagggtcaccagcggagtaatattgtgcttcgccatttcatcaaacagcttatcgtaaaaggccagcccggcttcgtttggctgcgcctcatcgccctcagggaaaatacgcgcccaggcaatggatacgcgcaggcagttaaagcccatctcggcaaagaggctgatatcctccggataacgatggtaaaaatcgatagcaacatcttttataccgctatcgccaggcacgcgttctacgacgtcgccaaatacgccgcgcggctggacgtcagaagtggttaatcccttcccgtcttccagataagcgccttcaacctggtttgccgcggtcgcgccgccccataaaaacgcctgtgggaatgtcttcattcatctctctcctgtgattaacggcttacggacaacagcggctgaccggcatccaccgcgctggcggatacgatgtcgagagcacgaaaatcgtcgctgttgctgataataatgggcgtcgccagatcgtaaccggcgttcagaatcgcctgacggtcaaactccagcagcagatcgcccgctttgattttgtcgccctctttaacgtgggcggtgaacggtgcgccatcgagcttgacggtgtcgatgcccacgtggatgagcagctcgattccgctatcgctcagcagaccgatggcatgtttcgtctgaaaaatcgaggcgacctcgcccgagaacggcgcaataactttgcccactgaggggataatcgccacgccctggccaagtaaaccgctggcgaaggtgctatcgggaacctgatccaacgccagtacgctgccggtcatcggcgccaggatgtcgttttccgaggccggagccaccacaacggccgcctgttcagcggtgctgcgcggcagcccggcgactaacgtgagcgcgcaggcgataattaaagcggcaaccgtccccagcgcgccgccccacaccgtggcgtcaatgccctgcggcgggatcatctgcgccagggtgaaaatattaccgaaaccgaaagaatagacgtggctgtcgctaaagccgacaatcgcgccgccgatggcgccagcgacgcagccgaagataaacggacggcggagcggcagattcagcccataaatcgccggctcggtcacgccgaagatccccgcggataccgccgagcccgccagcactttttgccgcgcatcgcgggtgcgcaggaaaatccccagcgcggcgccaacctgccccatcaccgccggcagcagcatcggcatcatcgaatcatggccaagcacggcaaggttgttaatcattaacggtatcaggccccagtgcagcccaaagatgacgcacacctgccacagcgcccccatcgccgcgccggcaagccagggcgcaacctgatagataagctgatagccgttggccagctgctggctcagccaggtcgcaaccgggccgataatcagaaacgtgagcgggacgaccacggccaggcaaatcgccggggtaaagaagttcttcatcgacgagggcagtatcgcgttgctgcgccgctcaatccagcagctcacccacgaggcgaggataatcgggatgaccgatgaactgtaattgataaaggtcaccggaatcccaaggaaatactccgccgcggcgtcaggcgccatactggcttcaaaagattgaatcatcagcgggtgggttaacgcgccgccgatcaccatggtaataaaggcgttgccgccaaatttcttaccggcggtatagccgagaaacagcgggaaaaagaagaacagcgcatcgctggcggcaaaccagattttgtaggttgcctgctgcgtcgttaaccagccgcaaaccaccgccagcgccagcagccctttgaggatccccgaggccgccaggacgccgataaacggggtgaaaataccggaaaccacgtcgataagctggccgataatcgacactttttcgcctttcaccgccaccggctcgctgtcatccgtcagtccggcttcgctgcgcaccgccagccagacatcgtgcacgtggttaccgatgaccacctgaaactggccgccgctttccaccaccatgatgacgccaggattcgccttcagtccttcggcatccgccttcttgctatctttgagcttaaaacgcagccgcgttgcgcagtgaaccagactcacaatattctctttgccaccaacccggctgagaatatcctgcgcgagtgctttatattccatgctgtttttccttacttccgctgcccgcaggcatcgttaactgagtattaaaaataaaaaaaaacccgagaacaacgccgtgtaggcgttgcgctcaggttttgcctgcgtaatgcagtaacaatccagttgtagcgcgggagctatgcgccaggcccgatcggcgcttagcgtccctcttttctcacccgctcaatatgaatggcgagaaacataatttcttccgtcgtcagcggccgctggtagctcttttgcaggtgccgggcgacggtttccgcacacttccacgctttagggtagttatcctttaccgcgctgtgcagcgtcacatcatcatcttcgaccaccgttcgcgtcagcatgcgctgggcgaaaaacttgagatgggtgacaaagcgctggtagctcagcgactcttcatcgtagttcagcgtcagctgatacttcaccagctgcaggatctcctgcatgacccgggtgacgtgcattacttccggcatttcgctgttgagctgcgccgtgaccagatgcagggcgataaaacccgcttcatcttcggccagttcaaccccgagccgtttggcgataatcgcccgcgcttcctgccctaactcaaattccttcggatacagccgctttatttcccacagcagcacattacgaatagcgatgcccttcttctgccgctcaatcgcaaagtggcagtgatcggtcagggtaatgtacaaactatcctgtaacttaccgagacgaccgcgcgccagatcgatgatccgatcgcaggtcgtcatcacttctaatggtatctgactgagtaattcacctaaacggccaaccagttcatcgctctgcagcgcgaagaccttttcaattttactttcatcaagagagtcaccaacgcgtttctgaaaggcaagtcctcggcccatgaccacctgttcgcgctgctgctcatcaacaaccaccactacattattattaagtactttggcgatttgcatatgaaccccaaaaacaaaaaaacctgaccccgacggatgccaggaaatcaggttttgcctgccggagcagtaacaatcggtagtgagtatttcactgtccgccgggtaatctcaatgggacaagctaaaaaatgtgatgccggtcagatagtttagctacgccagtcgttaatcgtgcgcgctatgctggttgaatcctgtagggtgcgtaccgcgctgaacaggtcagccgcttcgaggtactctttacgcaaatagctcagccactgttttatccgcgcgacgtgataaaggccggtgtcgccctgcttttccagacgggtgtatttttgcagcagttcgaccacctgcggccagggcatacgcggttcgttatattttatcacccggctcaggtttggaacgttcagcgcgccgcggccaatcatcaccgcatcgcagccggtcgcggccaggcaatcctgggcgctttgccagtcccagatttcaccgttggccaccaccgggatagtcaggcgctgacggatttcgccaatagcctgccagtcaatgcgctccgctttatagccatcctctttggtgcggccgtgaaccaccagctcgctggcgcccgcctgctggaccgcatcggcaatttcaaaccgccgctcgccgctgtcccagccaagccgaacttttaccgtgaccggcagatggccgggaaccgcctcgcgcatcgctttggcgccgcgatagataagctcgggatctttgagcagcgtcgccccgccgccgctgccgttcaccagctttgacgggcagccgcagttaaggtcaacgccccaggaaccgagctcgaccgcgcgagcggcgttttccgccagccactgcggatactgcccgagcagctgtacgcgcacgcgggtgccggacggcgtcaggctgttgttatgcagttccggacacagtctgtagaacgattttaccggcaggagctgatccaccacgcgcaaaaattcggtgatgcagagatcgtaatcattcacttcggtcagcagctcgcgcaccagcgaatcgagcacgccttccatcggcgccagtaatacacgcatattgttttttcattgcccggaaaaaagaggcgctatgttagcgcctctggatgcgggttgaaaggggccaagatcggttttcccggcagcggcgctgctgcttcccggcttgcgctgcgcttagccgggctacaaggtcacctctgtctgcgccccgggaaatgcacagccgcttaacgtggttccaggcagttatcctctttccagccgtacagccactcgatgccgcgataaaactcgctctgggtcttgcctttccacagcaggttgcgtacctggcgctcaacgccggcggcgtgatagacccgccccatttcacgcgtcgaccagacgatccgcgcggtacgcggaatacgtaccgactcatacagcgcgaaagcgcgggcggcgtcgccgtcgcactgcgccagggctttacccagcgtcaccgcgtcttccagcgccatacaggccccctgggccatatactgcgccaccgggtgagcggcatcgccaaccagcgtgatgcggtcgttgccccatttctctaccggctcgcggtcggcggtggaccagcgccgccaggaggtcggcttatccagcatctgccggggacgcgggtgaatgcctttaaagtaggagagcacctcttctttactgccgtcgcgcacgccccactcttctttctcccggctgtggaaggtcaccaccagattgtactgcttgccgccgcgcagcggataatgcaccaggtggcagtgcggacccgcccacagcaccggcgcgttaatgcgcaaatcgtccggcatatcggcggcgtcgaccaccgcgcgatagactacatggccggttacccgcggcgtatcgcccagcaggctctgacgcaccaccgacttcacgccgtcgcagccgatcaggatatccgccgtccagctgttgcctttgtcatcgaaaaccgtcacgtcgtcggcggtctggcggatatccgccacctgggtcgaggtgcggtactccacgcccggatgactctgcgccgcctcccagacggtggcgtggatgtctacccggtggatcaccgcatacggcccgccaaaatggtcgcggaacgcctgtccggtctcaatatgcaccacctcttcgccgcttaccgcatccatcatggtgatatggtcggtaaataccgcccgctgccgggcgactgcgccgacgccgaggctgtccagcgccgagaacgcgttagggccaagctggatccccgcgccgatttcgccgatttcatgcgccttttccagcagcatcaccttgatgccctggcgcgccagagagagcgccgtggccgctccgccaataccaccgccgacaataattgctcgcatcacttttgccatgttgcctcctaagccgggatcttatcttgttggttttccggcgcggcggcgataaacgccggtagccgggtgcagacgtcatagaccgcctggcagcgcggatagtggctgagatcgcagcccattctcagcgcgttggcccactgcggaaccagacagcagtctgccagcgtgggcgcatcgcccacgcaaaaatcgccggatttcgcgtggcgcaatagctgctcgacggcgctgaatccctgctggatccagtgcgcataccagcgctttttctcctcttcgctcaccttcagttcgtcgctgaggtagcgtaaaacgcgcatgttgtttattgggtgaatatcgcaggcgatggcgtaaacaatctccaggacccgcatccgcgcgctgtcctcctggggcagcagcagcggctgcggatagtgccgatccagccagtcggcaatcgccagcgactggccgagagattcaccatcatcagtaatcaacgttggcaccaggccaaccggattcagccgccggtactccagcgcgttctgctgaccgatgcggatattgacgcccacgctctggtagtcgatgcctttcagcgccagcgcgatgcgcacgcggtaggaggctgagctattgaaaaaactgtacagcttcatcattcacctcacaccacgcgcacggcgattggcgtcagtccatctacgttgccggtgatgacatcgcctttcaccaccgcgccgacgccttccggcgtgccggtgaaaatcagatcgccgggctgcagctcaaagaagccggaaagatagctgatggtttcattgaccgaccagatcaggtgacgaatatcgctgcgctgatgatcttccccgtttacctgcagccaaattccggcctggttcacgtccgccgtatccgctttatgcagcggcgcaatcggcgcggacaggtcaaaagctttaccaatctcccacggacggcccatctggcgcatctccatctggcgatcgcggcgggtcatatccagccccgtggcatagccccagatatactcatgggcctgctccagcgggatatcgcttccccgcttgccaatcgccaccaccagttcaatttcgtagtgatagttatcggtttgcgtcggatacggtaactccagcgtctctcccgcagcgacgggcaccaccgcatcggctggcttacagaagaaaaacggcggttcgcgatccgggtcaaagcccatttcacgcgcgtgagcggcgtagttgcggcccacgcagtaaacgcggcgcaccgggaactgctcatcgctgccgacaaccggaacgctaatcggggcctggggtgcaaaaacgtattgagtcatgatggattccttattcttcatttttaataacgcgcttcgcggaacaggccgagcgcttcctgcacgggacggtccgaaaagctgaataacacggtatcttcggcagagttaaaagagacggcatgccaggtcggcaccacgaagatatcttttgcctggaaggcgaaggtctgttcgccaatggtgacctggccgctgccttccaccacgtgatagatagtgctgtcggtggttttcgccgcgcgtgaggtaaaccctttcggtaacagctgcaggaaggcgcccatcgacggcatcggatagccgccggtaaccgggttgacgtagcgcattttatagccgtcccactcgtcggcatcgcccatacgcgtcaggtcgtgcagcgcttcgcggctgcggtcgtagcgatagttaaagatgggcgaagagttaccgacctgatggcgcagcggcagcatattggcggcgtagcgcggcaggtagtctccctctttgcgggtcaccggctgctgatcttccgggtaatcctcagcgaagccgcagcccagatagttcaccagcggcaggtcgaggccgtcgagccagaccaccggctcattgccgggattgccgtgatcgtgccagcgccactgcggcgtcagaataaagtcgccggcgcgcatggcggtgcgttcgccatcgacggcggtaaatgccccttcaccttcaaccacaaagcgcagcgccgactggttatgacggtggctcggcgccacttcgccgggcatgatcagctgtaaaccggcgtacagcgaggaggtaatcgatgactgtccgcgcagcgccgggttctccagcaccagcacgcggcgtatcgcctctttcgcgccaatcagctcgccgcttttcatcagcagcggacgaatctcctgataattccagtaggccggggcgcaggtggcattcggcgttttcggcaccaggtggtgcagggattcccaaagcggcgtcagattttggccggaaatatgctgatagtactgctgacggtctttattgatttccattgaagattgagtcatgagcgttctccttatttattcacgatgccagcagaaggcaacgcggcaggtacagatgttgggttgcggacggcaagcgtcagcaggacaagcatcacggcgctaacgacggccggtactgcgataacaaaaaacagggtgtcaaaagagaaattcatcgccatcatcacgccgccggagagcgagccgacgatggcgccgcagcggccgaccgcgtttgaccagctcaccccggtcgcgcggctttgggtgggatacagcgtagcggttagcgcattcagccctacctgcgagccgctgatgccaatcccggtgccgaaaatcgccagcgccatcagccacaggccgttctcgctcaggccaatcatgacgatacaaaccgcccccaggccgtagctcagcgccagcacccgatagggattgaagcgatccatcagcacgccgagcagcagcgcgccaaaggtgccgccaatctggaaggcggcggtgacccacgaagcgtgctgtaaatcaatcccccggtggttaagcagcgtcggcatccagctggagagcagatagataatcagcaggctcataaagaacaccacccatagcattaaggtgatggccagctggcgaccggtgaacagctggctgatgctgcccttcgcccctgcggcaggctcatcaagccagaaatgggtatcggtatagcgttcgccggttatggcactaacgtttttggcaatcaccgcctgcgggagctggcgacggatctgccagcgcggagattcgggaagcagcggtatcagcgccaccgccagcagcagcggcaaaacgccgcccagcaccagaataccgtgccagccaatcagcgggaccagctgcgcgctgaccacgccgccgaaggccgagccgagggtgaatccacaaaacatcagggtcaccagcgccccgcgccgccgggcgggcagatattccgaggtcatggtaatggtattaggcatcgcgccgccgaggccgagaccggtcagaaaacgcaggaacaccagcatctgtagatcgggggcaaacgcggaaagcaggctgaacaggccgaacagcgcgacgcagaactcaatcacccgtttgcggccaaagcggtcggagagcggaccgcagagcagcgccccggcggtcaggcccagcagccctgcgccaaatagcggcgcgaggtcaccggcggttaattgccagtggctgcggatatccggcgcaataaaaccaatcgcggcggtatcgaagccatcaagcatcaccaccaggaaacagcagataatcacgcgccactgccgggcgccgaccggcacagcgttgagtagtttttgtagttcaagtcgttgagtcatgattatgcctcagagcaggtaggggtagatgttgtatttatttcttttatgttgcgagtttgtaactgtggcaatgaaatgtacaatggtatttcgggcatagacataacctggaggttatcgctgatggcagactggacgcagaaactgaagctgcaccatttacagatgctggtggcgctgggggagcaaggcaatctcacgcaggtggcgaaaatgatgaacattactcagcccgcgctctccaaatggctcagccagtttgaagacgaagtcggcatggttttgttcgaacgccacagcaaaggtctgcgcccgaccgaaggcggaaagctgctgcttcagcacgcccagcggctgattaacgatatgtcgcgttcgcagtatgaaatcgagcgttttaaacagggaggacaggtgggcagcctgatgatcggctgttcgccggtggcgaccgactgcgtctcacaggcgatcctcgaactgctgaaagagatgccgaccctgcacctgaatattgaagagaaagtgatgacgccgctgcttaacgacctgctcgccggggtggtggatgtcgtcgtcgggcgcgtcggcgggcgggcgctggagctgccgctgagctaccgggtgctctacaccgaaccggtctgctttgtcgcccgccccgatcacccgctggcccagaaatcgcgattaagctgggccgacctctctccttggcgctggatcgtctggcccaccggcacgccaattcgcctgagcatcgacaacgcgctggtggataacggcgtgatgctgccggaaaacaccattgagtccgcctcgatgaacgtcaccagcaatctgctgcagagcagcgatatggtctcgattctctcactgcgcctggcacagcgctacgcggcccagcaccagctggcgattcttaatttgccgcgcattgaacaaaaaggtagcgttggggtgttctggcgaaaaagtgaagcgccgtcgctggcgctgagccgatttctccattgcctgtccctgcaatcttcactctgaccgccgtccggtccggtgttcacggtctctatcgcaggtatgcgcagaattcatgatgtgatcggtagcacatttttggctttaattgtatgatgaatgcggttcatcaagggttattaccatgagtaaatcactgattattatctggcagtatctgcgcgctttcgtgctcatctacgcctgcctgtatgcgggcatttttctctcttcgctcctgccgatcgcgattcccggcagcattattggcatgttgattctgttttttctgctggcgctgcaaatcttgcctgcacagtgggtcaaccccggctgcaacatcctgattcgctatatggcgctgctgtttgtacctattggcgtcggcgtcatgcagtactgggatttactgcgcgcgcagtttggcccggtggtggtctcctgcgcgataagcacgctggtggtctttttagtggtcagctggagttcacacctggttcacggtgagcgcaaagtggttgggcaaaaaggaagtgaaaaatgatccatgaaatctggtggtcgctgccgttaaccctggccgtctttttccttgcccgcaggctggcggcgcggtttaaatttccgcttctcaacccgctgctggtcgcgatggtggtgctgataccttttctgctgattaccggcatctcctacgagcgctatttcctcggcagcaaaattcttaacgacctgctgcagccggcggtggtggcgttggcctttcctttgtatgagcagctgcaccaaatccgcgcccgctggaagtcaatcatcaccatctgctttatcggcagcgtggtggcgatggtcaccggcactaccgttgccctgatgatgggcgcaaccccgcagattgccgcctctattttgccgaaatcggtaacgacgccgattgccatggcggtgagcagcagcattggcgggatcccggcgatcagcgcggtctgcgttattttcgtcggcattctcggcgcggtctttggccacaccctgctgaatgtgatgcgcatccgcaccaaggcctcgcgcgggctgtcgatgggtaccgcatcccacgccctggggaccgcccgctgcgctgagctcgactatcaggaaggggcgttcagctcgctggcgctggtgctttgcgggattattacctcgctggtcgcgccgtttttgtttccgctcattttagcggtggtgggttaaatgtgattttaatcacatttttaaatgcaacacagattagttgcaatgacaatgagatgtttatcacatatacaggttgtaaccacccgtacactagatttccattacattgttatgaggcaacgccatgcacccacgttttcaagctgttcttccccaactggcggcggacctgcaagcggccatcgccccgatgctggccgacccgcatttcccggccctgctgaatgcagaccaggtggcagcgctgcaaagcgcgacggggctggatgaagacgcgctggcctttgctttgctgccgctggcggcggcctgcgcgcgggccgatctgtcgcattttaacgtcggcgcgattgcccgcggcatcagcggcacctggtacttcggcggcaatatggaatttctcggcgccaccatgcagcaaaccgtgcacgccgaacaaagcgccatcagccacgcctggctgcgcggcgaaaaatccctgcgggcgattaccgtgaactacaccccctgcggccactgtcgtcagtttatgaacgaactgaacagcggcctgtcgctgcgcatccacctccccgggcgcgaagcgcattcgctgcagcactatttgccggacgctttcggcccgaaagatctggacataaaaaccctgctgatggatgagcaggaccacggcttcccgctcagcggcgacgcgctggctcaggcggcgattcaggcggccaaccgttgccatatgccttacagcaactcaccatccggcgttgcgctggagctgaaagacggtacccttttcaccggtagctatgccgaaaacgccgcctttaacccgacgctgcccccgctgcagggtgcgctgaatctgctgagcctcaacggatacgattacccggatatccagcgcgcgatcctggccgagaaggccgatgcggcgcttatccagtgggacgccaccgtggcgacgctgaaggcgctgggctgccataatatcgatcgcgtactgttaggttagtcacattctgcgggccaaacggcccgcgctgttgaaaatccccgcaattaaacgacggtttcttgcgcttgcccgacgggtaaagtagcctgaagcttccttcgtccactattgagccaggttcatgttaaagcgtgtgttatacagcctgttagtcctgttcggcttgctgctgttaaccgtgttgggactcgaccgctggatgagctggaaaacctctccctatatttacgatgagctacaggacctgccctaccgccaggtcggcgtcgtgctcggtaccgccaagtactaccgtaccggggttatcaaccaatattatcgttaccggattcagggcgcgctgaacgcctacaacagcggcaaggtgaactacctgctgctcagcggcgataacgcactgcaaagctataacgagccgatgaccatgcgccgcgatttaattaaagccggcgtcgatccggcggatattgtgctggactatgcgggtttccgtacgctcgattcgattgtccgcacccgtaaagtcttcgatactaacgactttattattattacccaacgcttccactgcgagcgcgcgctgtttattgccctgcatatggggattcaggcgcagtgctacgcggtgccgtcgccgaaggacatgtggagcgttcgcctgcgcgagttcggcgcccgcttcggcgcgctggcggatctctatatttttaaacgcgaaccgcgctttttaggcccgctgatcccgattcccgcgctgcaggaagttcccgacggcgcgcagtcctatccggcggtcacgccgcagcagctgctggagctgcagaaaaaagagaagtaaagcctccataaagtgagcgtgataactggcgtcttatcgagcgggaatacttttctgattacgcgagtgagtatcgggatactgaggatagataccctgaataattcgagtggcaggaaggcggcaaattatcatccagaaaatgcaaaaggcagacgcctgaactgacgcctgccttcattcactactcgttacttcttccgcgcatacttaagcgaatccagcgccacggcgaagatgataatcgcccctttgatgatgtactgccagtacgggttcacgccgatataggtcagaccgtagttgatgacggtgaagattatcaccccggtcaccacgccaaatacggtaccgacgccgccgctgaacgatacgccgccgaccacgcaggcggcaatcgcatccagttcatacataaagccaaggttgttggtcgccgaaccgatacgtccggcttccagcagcccgccgaacgcgtagaacacgccggagagcgcataaatcatcagcaggttcagggcgacgttgacgccggagaccttcgccgcttccgggttaccgccgatagcaaaaatgtttttaccaaagcgggtcttgttccacaggatccatacgaagaatacggcaatcagcgcatagaaggtgatatacgacaggcggaatgagcccagcgccacaaacccctgggcaaactgcgagaagtggctatcgaagccggaaatcggcgacgcgccaacaaagtcgtaatacagggagttgataccgtaaacgatgatcatcgtgccgagggtggtgataaacggcgtcacgttcaggtaagcgatgataataccgttgataagaccaatgaccgcgccgatcgcacacaccagcaggataaccagcgggatcggcatcgtggccatctccgggaacaccttattggcattgtccaccgcctgcagcatcgtggcggcgataaccgccgccaggccgacctggcgtccggctgaaaggtcggttccctgggtgacaataagtccggccacgccgagagcgataataatacgcaccgaagactgggtcagaatattacttaagttcagcaaacttaagaaagtcggatcctggaaaataataatggccagcaatactaaaagaaccacgtaaatcccaccttctttcaaataggtgagaaaactctttttatttaacgcactcatgaggagcccctgatcttaaaggtgcaacgacgcaagacggagaatttcgttttgcgtggtggttttagtctcaacaattccggcaacaagaccattgctcattaccagaatacggtcagtaatacccagcagctccggcatctcggaggaaataataatgattcctttgtctttttttgccagctcggcgatcagctggtaaatttcgaacttcgccccaacgtcaatgccgcgcgtgggttcatcgagcatcagaatttccggctgggtcaataaccagcgaccgataatcactttttgttggttaccaccggacagcgaaccaatttgcgtgtgctgccccggggttttcacgcgcatcgaatcaatcacccattgggtatcgcttttcatgcgtgaattatccagcaatccgaccttattcttgtatttcttaatattggagatcagcgagttaaaaccgatatccaggtaggcataaattcccgtcgaacggcgctcttcggtcaccagcgcaaagccatggttgatggcttcattggcattatggttattaatcttcttaccgtgcagcttgatcgtcccgccggccttctcgcgaataccaaataacgtctccacgatatcggtacgtttcgcgccaaccagtccggcaatccccaggatttcgcctttgtgcagatcgaaagagacatcgcgaatcgatggctggcgcagtgaggttaaattgcgcacctcaagaattacctcacccggcttattctccttgttcgggaagcgctgattgagggagcggcccaccatcatcgcgatgatcttatccatatccagcccttccagcggctgggtggcaatccactggccgtcgcgcaggatggtaatttcatcgcacagctggaagatctcttccattttgtgggaaatatagactatgccgcagccgcgctctttcagcttgcggataattttaaacagatggttgacctctttttcggttaacgaagaagtcggctcatccataatcacaattttggcgttataggaaaatgccttcgcaatttcaatcatctgcatttgcgataccgatagcgttccgacgcgagcgcgcgggtcgatatcaatatccagctcatcgaaaatcgctttggtatcacgatacattttgtcctgatcgacaaacatgcctttggtgggataacgccccagccacatgttgtccattaccgaacgttgcaataccaggtttaattcctgatgaaccattgaaataccgttttccagggcttcttttgccgaatggaaatcgatctcttgtccctgaaaaagaatactgccggaatctttttgatagattccaaataggcattttaataatgtagatttgcccgcgccgttctcccccattaacgcgtgaatagagtggggacgaaccttgaggttcacattatcgagagccttgacgccaggaaacgatttgttgatgttgctcatttccaacaaatattcgcctgaccgttcgctattattgctgaccatagttatacctggctgcgtgcgtgcataccccagccgacgcattaacgacgagccgggacgagttctgtatcaggaataatcgggcgtacaagcgcgtacgcccgcagcttattaagcgattacttaccgataaattcgctcagattatctttatcaacgccaacgtacggtacgcggacaatcttattatcaattttccattgagtaccggcagccggttctttaccatcggccaggtttttcgccagatcgaaggtggctttcgcctgattgttggcatcgttcagtacggtacccgccatggcgccggatttcaccagcgccagcgcttcaggcagcgcatcgacgccgaataccggaatgctgctcttattgtgcgctttcagcgcttctaccgcgcccatggccatcgcatcgttgttagcgatgacgacttcaattttgttggcattcgggccagacagccaggcatccatcttatctttcgcctgagcggtatcccacatggcggtatctaacgccagttgctgagttttgaagcctttatcgttcagctctttaataacgtaggtggtacgcgcttccgcatccggatggcccggctcgcccttcagcaggacaaactgaatctggccgtctttattcagatcccagttcgggttcgctttccagtgcttggcaatcaggtcaccctgaatcacgccggactcttttgagtcggtaccgacgtagtacgctttatcgtagctatccagcgccttgcgggaaggttctttgttaaagaacaccaccggcacgttctggccacgcgctttatcgatgaccgtccccgccgccgccgggtcaaccaggttaatcgccagcgccttcaccccttttgccagcaggacgtcaatctgatcgttctgcttggactggtcattttgcgagtcattcatcagcagctgaacatccggcgctgatttgccatctttttcaatcgccttacgcaccaccgacataaagttgtcgtcgtatttataaatggtcacgccgatacgggtatctgctgcgtgagccgcggcgccaaataacatgctagccattacagcagacagggttaacaccttcttattcatggaatctccggttttattatgcagggtctttggtgtgaaaatggctggcgagcgttacatttatgttactgcacagcgacattcacgactgtaattctgtcttccgtgtagggtaacgctcctgaaaaacggctttattaatcgtttaaccgccgattactgctgtaaaagtgattaatcaccgtgacatagtatgttcagacttgtaaacgcagcaatcatagtcagcttaatgttaacaaactgtgaaatcactcacatattgaaagcggttacatcaggcagataattagttagtgatcggccccacaatttgcctctgcgccaccgaatgtcggcgcaccagcgtcggcataaagcagtggctggcatcacgatccagctttcccgccgcgccctgtagcgccagctctgtcgccagtttcgccatcgacataatcggataacgaaccgtcgtcagctgcgggtcggtgtaacgggaaatggggatatcatcaaaaccgatcagcgaaagatgctgcggtacggcaatgccgttatctttaagcgtcgtgagcgcgccggccgccatactgtcgttgtaggcgaaaaccgcgctcagaccaaggttgcgccccagcagttcgaccatcgccgcctcaccgccctgcatatccggcgacccggatcccacccagctttcgggagcgacaatgccgtgttcatgtaacgcccttaaccacccttctcgccgtaaatcatcatcttcaatgccgtgattggaagagaggtagccgatgcgctggtgaccatgattgagcagcatgcgggtcgccatcagcgcgccgctgacgttatccagcccaacgcagcggtgggcgtatcccggcacgatgcggttaatcagcaccattcccggcatatgctccataaaatcccccagctccgcgtcgctcagcgctttagagtggacgatcagcgctgaacagcgctggcgaatcagcacctcaatggcgttacgctctttttccgcttcatgatagctgttgccgataagcacatatttctgatgctgctgggcgacggtatcaaccgctttgaccagcgcgccaaaaaaggcgtccgacacgtccatcacgaccacgccgatggtatcgctgacctgcgtcgccagcgcctgcgcgttggcgttcggccgatagcccaacagcgttaccgccttcattaccgcttctcgcgtatccgggctcaccagcgcgctgttattcagcacgcgcgaaaccgtcgcgacggaaacacccgcctggcgggcgacatcacgaatggtgatcatactcaccgacctgtagagcattgcagtacgtcacactcacctcctgtgttcagcaaggaggctattctggcagcgacgtgccgtacgctacgtgagtgaagtcacagggatggaaacggttacatccattttgttaatgattgtgatccagatcgttatctggatgtatcttttaatgatgtccccgacgcacgcagggtgaattgacgccatagccactcaacgggcccctggcggaaatgacgtagccaaaaccacgagaagagaatattaaccgcccatacggccggtacgaaggctaacagctgtaagcggtcatacttcataaacaggccgaagcggtagaacagggtagtgcaaatcagggtctgcagcagatagttggttagcgccatgcgcccgacgcaggcaatcgcccccaccagacgactctgacacagctgcggccagaagccccaggccagcgccgcgtagccgatggtttgcagcggcgcgcccagctcccgcggcgcctgtagcaaaaatgcgcaccagcggtagtcccagccaagatgccactgggcaataatcgagggcaagttgaccgccattccggccgcaatcagcagcccgccggtacgccgatagtggcgaaggctgaactgccctttgagccagccgctgcgcatcagcgcggcgcccatcagcatcataccggccagctgccagccgtactgcgcgcccagcgccagcaggttatccgacagcatatccgcacgattgctcaccgcttcaaagccgccttttagcttccagtactgctcgtactgcaaatttgccgcgtccggcagccacgaacgattgggcgtattgccggaaatcaatcccagcaatagcagtaccgccacgccgataacgtacagcaccacgccggtattaaacagcgatttgacatcgtgcgcgtcgcgcaccatccgccagcccaccagcccgaccagcgcataggccagcagaatatcgccgtcccagaaaaacagtccgtgaataaagccaagcagcgccagcagcgtcaggcgcgactggatccagcgcttgccgcgcggcagcagaagctgaagtccggcgccaaacagcagggcgaagagggtcaggaatttgacctgcgccagcagatcgagaatcgcccaagtccaggcgtcgctggcggaaatgttcccggaccacgccgggttgaggtaagcggccttcggtaaaccgaaggcgctgatattcagtagcaggataccgaggatggcgacgccgcggacaaagtccagcgtgacatttctctccatgtaccctgctccgttttagttgtggtgacgtacggcgcgcaggaactcctggcgggtattctggctggatttaaacaggccgcccagcgacgtggtggtggtggcgctggtcgcatcgcgaatgccgcgcgctttcacgcagtagtgcaccgcatcgatggaaaccgcgacgttgctggtccccagcagcgtttgcagcgcggtgaggatctgctgcgtcagccgctcctgcacctgcggacgctgggagaagaactgcacgatacggttaattttcgacaggccaatcaccgaatctttcgggatataggccaccgtggctttgccgtcaatggtcacaaaatggtgttcacaggtgctggtcagggtgatatcgcgcacggtcaccatttcatcaacctgcatcttattttcgatgacggtgattttggggaaccgggcgtagtccagtccggagaagatctcatcgacgtacattttggcgatgcgatgcggggtctccatcaggctgtcatcacttagatcaaggtttaacagctgcataatctcggtcatgtgtccggcgatcagacgcttgcgagtttcattatcaatttcttgtactggcggacgcagcggcgtctccagcccacgagcgaccagcgcttcatgaacgagtatggcttctttactcagtgatgacatttttgttctcctgcaggtgtggcgctctttgctcttctgagggcaaagtttgtattcattgtgcgtgaggtgacgcacagaatccagtagccgcatcgataattgttgaaattggcgtcacctctcgttccacgccgccagaccagcgcactacgatgcgtcacgcaacgccctgctcaccttgccgcaaccaagccaatcgccgacccatagcgcgacgcctgccgctgcggcaaggtcagcatgttggttaaaagttgcattaatgatgcaatacgttccgaaaaggaggaagtgaaagttactcacgagggcatgaaatatctgtattatggaaaattacgcctgagacacttaaggagccctgcatggaactgctcgaagagcaccgctgttttgaaggtcggcagcaacgctggcggcacgactccgcaacgctgaactgcgcaatgaccttcagcatctttttacctcccgccgccgctgacgcgccgccgccggttctctactggctctccggcctgacctgcaacgatgaaaacttcaccaccaaagcgggcgctcagcgcgtcgccgccgaactgggcattgcgctggtgatgccggacaccagtccgcgcggtgataacgttgccgacaatagcgcttacgatctggggaaaggcgctggtttttatctcaatgccacccaggcgccgtggtccgcgcatttccgcatgtacgattaccttcgcgacgagctgccgcagctgattgcccgcgagtttaatctcagcggccgctgcgccatcagcgggcattccatgggcggccacggcgcgctggtgatggcgctgaagaatccgggccgcttcgtcagcgtttccgcgttcgcgcctatcgttaacccgacccaggttccctggggcaaaaaagcgtttaccgcctatctgggagcggataaagcggcctggcaggcctgggacagctgcgcgttaatgcaggccagcagcgagtcagatgcgattccaaccctgattgaccagggtgacagcgatacattcctcgccgaacagctgcagccggcggtgctggcggaaaccgcgcgtcagaaaagctggccgttaaccctgcgtattcagcccggttacgatcacagctactactttatcgcctcatttattgaggaccacctgcgtttccatgcccgacacctcttctcctgatccttcaatgcgtcgtgaatcaccttcccggcgcattgatgcttttccatctggcttcaccctgagcgcctttagcgagggctggcagggaaatccgccagccctcttttatcgcccggttagaagcggtaatcgacggccataaagtagcggcggccttcttccgtatagctatagtcgtcgcggctcagatccttatcgcccacgttgagtaccccggagcgcagcttgacgtttttggtgacgttccaggccgcgccgatatcaaacatggtgtagccgccgggcgttttgcccgtcgcgctgaccgaacgctgttcgccggtatagttggcggtgacgtagaaggaccagtcgtccagcggtttccagtcgagggtaccgttagcggtatggaacggcagcgtttgcagcggtttatcgccgccgttactcaggtcgcggccatcgttgtaggtgtagttgaccgtcagcttccattcgtcgccgaacggcaccttcaattccgtttctacccctttgatacgcgccttattgacgttgaagtagcggaataccggcacacgcttaccgttcacggttttccagccgacaaaattcgggtagcccggcgcttcgctggcgctggaagtacgcaggatatcgatcatatcgtcaacgttattctggaaggtggtgacgcttccttccacgccttcaagccagccttcttcaccgcgatagtaaagacccagttcgaagctttcgctggtttccggtttcagatccgggttaccgataatgctgcacgagccgcggcaggagttggtggtccagtccgggttcagctgcagcagggatggcgctttaaatgctgtcgcccagccgcccttcacggtcacggtatcggtggcgttatacaccagataagctcgcgggctccagtgatcgccataggtctggtgatcgtccatacgaatgccggtcgttaaggccagaggctcgattatccgccattcatcttcgaggaacagcgcgtactggctggcggaagtggatttaccgccgctgctcaggttgaccggatctttcagcttatcgtgacgccattcgccgccgaaggtcagcagctggttgatcatgcccagcggcagaacgtatttgccgtccaccgagttactctcagatgtgatcgtgccggcctggcccggatttttattatccactttctcgccgtagaatttcagctcgctattgccgacatcccagcggccgttgtggctcagggagtagttctggcgctcaaggcggttgcggtcaagagagtcggaatcccgatcctggcgatcgaacccgtagccagcggtgatgtcctgattatcagtgggcgtccaggcgaattcgacgttgccgtcgcggctggtgaagccttcaatacgcggcgtttcgccagctgcgttgctggaagcctgctgatcgtccttggcacgctttgccaggctgccgtaggctttcatccccagcacgccgtcaatcagcgggccgctggtaaagaactgaccgttgtacgtatcgccgcgatcgcggtgttcctgaatggtggtatccgcgctgagggtgcccgtccactgctgaccgacttttttggtgatgatattgaccacgccgccgagggcgtcggaaccatagagggaagacatcggcccgcgcaccacttcgatacgctcaatggcatcaaccgggatccagttgaggtcaaaatcgttgtggcggaaaacggcgttgcgcgagttaacgcgtttgccgtcaacgaggatcagcgtatagccgctgctgaggccgcgaatgctcacccctttgcggttatccccttcgttggtgagctgcacgcccggcacttcccgcagtacatccttcaggttttgtaccggtctacgctgcagatcctgttgggtgataacgctaatactggcgggcgcatctttgacgctctgttcagttgccgcagcggtgacgaccagcgtttcttcgttaacgtcggcgagcgccggaaacgccagggatacgacggacgcgcataatccggcccggacaaaagggtttagcctgaacattccatatctccatgaggtgtacaacaaaacaaacaaaaaaggtcctgctcacaggtactgtcggcatagcgctctaacggcgtatgcgcgcaattttttacagtagatgtggctggtcgccccttgtcagtctgaccctctgcaagatacggggattggcttcatcctgaatttggcggaaatgataaagataatgattacaattatcaataaaattatgaataactgtatcaacatgtaagaatcgcagacataaaaaaaaccctctcgatgaaagggttttatcttacggcgtcagctgaccttagcttttaaaacgctccgggaacttcatttcgctgtagcgcacaaaacgcgttcctttcgccagcttgtaaccgaaccagatcaccaggaacagcggaatgccgatataggttgccgccacgccgccccagtcgatggtatctttgaggaacgcttcgtaattctggcccagggtaatgatcaggcacagcacgaaagcgaagatcggccccagcgggaaaaagccggaacgatacggcagatcgttgagatcgttcccctgcagcacgtagccacgacggaagcgatagtggctaatagcaatccccagccaggcgataaagccggtcatgccggaggtattcagcagccacaggtaaacggtctgattaccgaacatcgagctcaggaagcacagccctgcaatcaccgtggtggcatacagcgcattacgcggcacgccgcctttagacagtttagagaaaatacgcggcgctttgccatcgcaggccagggtgtagagcatgcgggtggacgcgtacatcccggagttacccgccgacagtaccgccgtcagaataaccgcgttcataatcgccgccgccgacagcagccccgcgtgctggaagaccagcgtgaacgggctgacggaaatatctttcacgtcgttacgcagcaggctcgggtcggtatacggaataatcaggctgatgatcaggatggcgaacacatagaacagcaggatacgccagaacacctgccgcacggcgcgcggaatgttcttctccggattttccgactcgccggccgcgatgccgataagctcggttccctggaacgagaagccgacaatcatcgccacgccaatcatcgccgcaaagccgccggcaaacggcgcatcgtcgacaacccagttgctccagcccgccggctgtgcgcctttaaagatgccaaagatcatcatcacgccgacaataataaagatgatgacggtggccactttgatcagcgagaaccagtattccgcttcaccaaagccttttaccgagatccagttcagcaggaacatgatgccgaggaacagcgcgctccagacccagccgggtgcatcggggaaccagtaggtcatcaccagctgagcggcaacgaggtcaacggcgatggtcaccgcccagttgtaccagtagttccagcccagcgcgaagccaaagccttcctcaacgtaattctgcccgtaggtggcaaaagagccggacaccggcataaacgccgccagctcgccgaggctggtcatcaggaaataaaccatcaggccgatgagaatataagagagcagcgccccacccgggcccgcctgagaaatcgttgcgccagaggcaacaaaaagacctgtacctatggaaccgccaatcgcgatcatggtcaagtggcgcgccttcagttcacgacgtaaaccgggcgcttctgtggttttagtatccgaaaccatgtgaaaatgctatccatccaaaaaacgaggcgagattgtagcagagtgtctgtgatccatccgatacaattgcaaagttataagagagcttcatgatcgagcatggattattagtaaagcatgaaatcccgaaaacgccagcgcgcgtggcgtcagcttttacacgtcgcaataatgcagaaatcgctgtaatgccttggaaatatgcttctgccggtgatgaatgcgccacaaggtacgggttaagcgcggcagcggaatcgtcagctccaccagcgatccgacttcaagctgctccgccaccacgcgtcgcgacaggcagctaatgcccagaccgtggcgcaccgcgtgcttgatggcttccgagttgcccagctccatcccaagatgaaacgccggtaaatgcgagagtaataaatagtcgacgatctcccgggtcccggagccgtgctcgcgtaaaatccacggcgcttccgccagccgttgcagcgtcacctcccctgccagcagcggcgaatccggcgcggcaaagaccaccagatcatcttccagccagggttcggcgataatatccgcggcgtgacagggaccttcaatcagcccgatatccacgcgcagatcggccaccgcattgatcacgtcctggctattgcccacgctcagctccagcggtaaatccggcagatcgcgtcgatagcgcgcaatgatttccggcagaatatagttgccgatggtgctgctggcgtagacgcggatcgcgccgttgtcgccgcgaaacagctgctctatctccagcgcccgctccagcagcgccagcgcccgcggataaagcagcctgccgtgctcgttgaccaccagccttttccctacgcggtcaaagagctgcacccccagctgcccttccagttcggtcagcgccgcgctaaccgccgactgggaaagcgccagcatttgcgacgcctgagtggtcgatccgctttttaaaacttcagcaaaaacttccagctgacgtagcgtgatatgcatatttttcctgcctttatagacgactcgcgatccgcggcgtgaggctgaggcccatcgttctcaaaccgcgaaaccgcgtttttaccacttatttcgattaattataaatatataatcaattttatatttaaaccagcgagtcgtatgcttttcccagacaaaggagaaggttatgacagcactcactttaccgactaaacatcgcccattgcggcactttgcacctggactggcgctcaccgccctgctcaccggcgcagcgctgtgggccggtagctttccggctatcgctggcgcgggcttcagcgccctcacgctggccattttattcggcatggtcatcggtaacacggtttacccgaaaatctggcagccctgcgacggcggcgtgatttttgcgaagcagcacctgctgcgtctcggcatcatcttatacggctttcgcctgacgttcgcccagattgccgacgtcggcgtcggcggtatcgtgattgacgttctgacgctttccagcacctttttgatcgcctgttttcttgggcaaaaggttttcggcctcgataaacataccagctggctgattggcgccggcagcagcatctgcggtgcggcagcggtactggcgacggaaccggtcgtcaaagcggaggccagcaaagtcacggtcgccgtcgccacggtggtgattttcggtaccattgccatcttcctgtacccggcgatttatcccttcctggcgcactggttcacgccggaagcctacggcatttatatgggttcgacgatgcatgaggttgctcaggttgtcgcggcaggccacgcggtgggtccggacgcggaaaacgcggcggtgattgcaaaaatgctgcgcgtgatgatgctggctccgttcctgctgttcctcgccgcgcgcgtgaagcaattagccccggcaaacggcggtgagaaaagtaaaatcaccattccgtggtttgcgatcctgtttattctggtggcggtgtttaactccttccacctgctgccgaaagcggttgtcgatatgctggtcacgctggataccgtactgctggcgatggcgatggccgccctcggcctgaccacccacgtcagcgcgctgaaaaaagccggcgccaaaccgctgctgatggcgctgatgctcttcgtctggctgattgtcggcggcggcgcgattaacctggccattcatagcctgatggcctgaagcccctcgctactcaggttgtattaaggatgatgtaactctccggctaagccgctatcattaccctccccccagcggcttaactggagttttttatgaaatatattggagcgcacgtcagcgcctccggcggtgtagccaacgccgccattcgcgcagccgaaatcggcgcgaccgcatttgccctctttaccaaaaaccagcgccagtggcgcgccgcccctctgagcgacgaaaccattgctgaatttaaagccgcctgcgaaaagtaccagttcggcccggggcaaattctgccgcacgacagctatctgataaacctcggtcatccggttgaggacgcgctggaaaaatcccgcgatgcctttattgatgaactctcccgctgccagcagctcggcctgacgctgctgaatttccatccgggtagccatctgcagcaaatcccggaagacgaatgtctggcgcgtatcgccgaatcgatcaatatcgcgctggcaaaaaccgaaggcgtcacggcggtcattgaaaacaccgccggccagggcagtaacctgggctttaagtttgagcatctggcggccatcatcgacggtgtggaagataaatcacgcgtcggcgtgtgcattgatacctgtcacgccttcgccgccggctacgacctgcgcagcgccgaagagtgcgaaaaaaccttcgctgatttcgaccgaattgtgggtttccagtatctgcgcggtatgcacctgaacgatgcgaaaagcgcgttcgccagccgcgttgaccgtcaccacagcctgggtgaaggcaatattggccatgatgctttccgctggattatgcaggaccgccgctttgacggtatcccgctgattctggaaacgatcaatcctgatatctgggcggaagagatcgcctggctgcgggcgcagcaaacggaagaggccacggtctgatatgaacgacagggaaaagcagatcctcaaaattttgcggcgcaatccgctaattcagcagcatgagattgccgatattctgcagattagccgctcccgcgtggccgcgcacattatggacctcacgcgtaagggggccatcaagggcaaaggctacatccttaccgagcaggagtactgcgtctcgctgggcgcggtgaatatggatatccgcggaattgccgatattcattatcctcaaccggtctccaacccggggaatatccagtgctccgccggcggcgtggcgcggaacatcgcgcataacctggcgctgctgggccgcgatgtgcatttgatttccgccgtcggcagcgacttttacggcgaaacgctgctggagcaaacccgccaggcgggcgttaacgtgcagagctgtatccgcctgcacggccataacaccgccacctacctctccatcgctaacccgcaggaagagacggtgctggcgattaacgatacgcatattttacagtcgctcacgccccagctgctgaatcagtaccgggatctgctgacgcatgccggcgtcattctggtcgattgtaatttgacggagcagtcgctggagtgggtatttaccctggctaacggcattccggtatttgttgataccgtgtccgagtttaaagcgcaccgcattcgcccatggctggggaagatccacacccttaaacccacgctgcgcgaactccagatcctctggggacaggctatcgaaaacgacgcggatcgcgatcgggcgctagcatggctgcacgaaaggggaactcagcgggtggtgatttgctcggaagacgacgctgttttctgtagcgaagcagggggtgaacgcttccgaatgagtctgccggaccatacgacgatagacagcttcggcgccgacgatgcgctaatggcagggctactttatagctatctcgacggtagcgactttaaagagagcgtcgctttcgccatggcctgcaccgccatcacccgcgccagcgacggtatcaacaacccctcgttgtccgttgataacgcgctcaatttacttcccggcgtggcgtagcgcgcaccgcaggcgcggtgcgcgcagcctgttatgccagaccaataaagaacccggcaatggtggcgctcatcaggttagagagcgtggccgccgccagggcgcgcagcccaagctgggcaatctccggcgcgcgctgcggtgaaatggccgaaaacgccccgacaaccacgccgatcgagccaaagttggcgaaaccgcacagcgcgaacgagatgatcgcaacggttttcacgtccagattgccgccggcttgcagatagggagaaaagttgaggtaggcgacgaattcgtttatcgccagcttttggccaatcaggctgcccgccagcgtcgcatcgctccagtcaacgcccataatccatgccagcggcgcgagcaggaagccgaaaattccctccagcgtggcgtgaccgtagccgaaccagccgccaatgccgccgataataccgttcagcagagcaataatcgccacaaacgccatcactaccgttgccaccccggcggcaattttcaggccggtcatcgcccctgacgccgccgcctcaataacgcttttcggcggcgtctcggtgaaggagagattgtcgaaagtgacctgggatgcttcggttgccggactcagcatacgggcaaacagaatcccgccggggatagccataagcgaagcggccagcagataatcaatcggcacgcccataccggcatagccgatcatcatcgacccggcgatcgacgccatcccgctgcaaatcgcggtaaacagctcattgcggttgagcttgttgataaacggtttgacgatcgccgggatctcattttgcccaagaaaaatggtggtcacggcgacaaaagactcaattttgctgatattcagcgccttctggaagatgcccccgagaatccggatcagcagccccatcacgccgaggtagtaaagcaggcttatcagcgcggtgacaaaaatgatggcgggcagcacgcggaaggcgaagataaagccggcgccgtcaaacagcacgtccatcttcgggccgaccagtgaaccaaaaataaacgcgcttccggcgtcgctataggacatgactttatgtaccccaagcgcggcctgctcgaccagccacttgcccggcggaaagtagagcatcaccccgccaatgacgatttgcagcagcagcgccgcccctaccgttctgacgctgatgcgttttttattgactgacagcgcaaaggcaatggccagcaacaccaccatccccagaagacttctcatgatgtccataatgatatccttacctggtggaaaacccggcgcgggccaggctttcggtatcgttgatatcggggcgggcaaccgcaaacggcccgcaactgccgtcaggctacctgctgatactctttggcaatctcgcaggccagaatggcgttgttgaagaccagctgaatattggatttcaggctgtctccgcaggtcagctccgcaacgcgggccagcaggaacggcgtactcgctttccccaccacgccctgctcttccgcctccttcaccgcccggttgatggcggcgttgattttctcttccggcatcgcgaacgcttcaggaatggggttcgccaccaccatgccgccattcaaacccgactgccatttcaccgccatcgctttggcgatctctttggcgctattgaggcgaatgctgacgtcaaacgggctggttcggcagaagaatgccggcagcgcagaggtttgataaccaataagcggaacgccaaacgtttctaaatattcggtcgttaaaccgagatcgagaatagattttgcaccggcgcagacgacggtgacgttggtatttgccagctcctgcaaatcggcggaaatatcaaacgtgtgctcggctccgcgatgtacaccgccaattccgccggtggcgaagactttaattccggccattgcggcaataatcatggtggacgccacggtggtcgcgccatttaatcccgcggcgacaacaaagggtaaatcacgacgactgactttggcgacgttatgcccttcgcggcccagcagttcaatttcttcacggcttaagccaactttcatgacgccatgaataatcgcaatggttgccggcaccgccccctggcgacgaatggtttcttctacttccagcgccgtttgcgcattttccggaaatggcatgccgtgagaaataatggtcgattccagagccactactggctgattatttttcaacgcctgctgaacttccgcagaaacctgtaataattcagaggaaatatttaattcagacatattctttctccactaccttttttacgttggcgtaagataattcagggttattggtgaattccgatgagagcgccagagaagagcatccctgagcaaacttcaccgcttgcgaaaatgaacagccgtcgagccagcagcaggcaaggccggccatcatggcgtcaccggcgccggtgacgttaacgacctgcgtttttagcggcgctgaccagccgcgttcgccctctttctcgctgtagtaaaccccgtcgccgcccatgctcagcaccaggcgcttcaggccacgctgatgaaaccagtcggcaacgcgcgcgacgtcatccgtgccggacagcgcgatgccgctcagcgtttcagcttcaattcggttcggtttcagggtgtgaatacgctccagatgctggctgattttcacgcatttccaggctgaaaccggatcgacaaaaacgggcgttgcgccgcagttttccatcagccaggcgagagcggcctcgctgatattgcaatcaacgacaatcaccgcagcgttgcggataaaatcatgatgctgtcttaaaaacgctggcgtaatatgttctgtgatgctcatatcattaatcgccaccagcatttcaccggtattatcaagcagcgataaatagcttgaagtaccttctccctggataacctgacatttatcgacgtgaaccccggactgggccgtttgttttaatagagagtggccataaaaatcgtcaccgacaaccgataatagccacgctgttttatttaacaaggcaatgttttgcgcaatgtttcgccctacgccgccgggagtatattttattttcccggggttagaatccgcatagttcaacgatacattggaataaccagcaacatccatatttgccgatccaataattacaacgtaatcattttcaggcataaaaataccctccagcataaaaaatgctatggcagtggaattattgaatatcaataaataagcatactcccattcatcacccctcagtaaacacatgtttgaatgtgaacatgtgtttatgttaagcggaatgtttttaaagtaaagaggtcagcaagagggatttcatatgaacatgaacaaaatcacaaaaaatgagccgtatggtttttaaacagtttaaaaatgcgaaggagagcacatacggcaggatgagcgggaggagatgaggcataaaaaaagggcagagaagactctgcccttgagaacgatttagtaggtcgatcaggctgctttttcgactacctgaacttcaggacgtttcagcaccgcgtaggagagccctgcgaccagcgtaccgacgacaatcgccatcaggtaaccgagtaccggcgtaatcgcgccaggaatcagcaggacgaacagaccgccgtgcggcgccatcagcttagcaccgaccgccatggacatcgcgccggtgaccgcgccgccaacgatacagcagggcaggacgcgcatcgggtcgcgagcagcgaacggaatcgcgccttcggtgataaagcacaggccgagaaccagtgcggctttaccgccttcctgctgcgctttgtcgaacttgttacgcgcaaccagcgtcgccagacccagcgccagcggtggaaccatacccgccgccataatggccgccatcggcgcataggtttgggtactcagaagaccaacaccaaaggcgtaggccgctttgttcaccggaccgcccatgtcggtacacatcataccgccgaggatcgcaccgagcagaaccgcgtttgccgtgcccatggtttgcagccagtgggtcaacgcttcgaggatcccggcaacgggcttaccaatcaggtaaatcatcgccagacctacgatcaggctggaaaccagtggaatgatcaggattggcttcagcgcctccatactttgcggcagtttcagcttcgtactgatcgctttcgccacgtaaccggcaaggaaaccagcgatgataccgccgataaagccggacccggtgcttaccgccagcataccgccgataagacccggcgtcaggcccggacggtcagcgatggagaaggcgataaagcccgccagtaccggcaccatcagcgcgaaggctgagcccccaccgatttgcatcagcgcggcggccagggtgtctttcacttcaaaggctttaataccaaaagcgaaggaaagcgcgatacacagaccgcccgccactaccatcggcagcatgtacgacacgccggtcagcaggtggcgataggcgccagcggactcttttttgccttccgccgcggcctgggatttacccgcaggctgatacggtttcgcttcaacaacggctttatccagctcctgagcggttttcttcagcgccagaccggtggtggtgcgatacatcggcttaccggcaaatttcgccagatccacttcgatatcggcagccaccactaccagatccgcctgttcaacttcttccggggtgattgcattgcccgcgcccacggagccgcgcgtttcaactttcacccaccagccgcgttttttggcttcggtttcaatcgcttccgccgccataaaggtgtgcgccaccccggtcggacaggcggtgaccgccacgatgcgtttcggaccgttggtcgctgcaggtacagcggcagcggccggggcactgtaaggcgttgcatggcttttggcctcaccgaggaacagctccgggtgcgctacggcgcggttaatatcgccgagatagacctttttgccgttcagcgcgctgtcggccggcagcgccgtgcccagcacaatcgccagctcagcgtcgttcgggttatcaatcagttcgagttgcgctttttgcgccgcagtgcttaacagggtcttcgccatataggcgcgagcctgtccaagcccggcatcaataatcagcagcgttttcattatgcctctcctgctgttaattaaagggttgtaagtcgacgcgcgccatcattgcggccaactgggtacgatcggtaataccgacattgctctgactcaccgccagcgcggcaactgccgttgccaggcgcagcgtatgttcgctggactcacgcatcagcaggccataaatcaggccgccaaccatggagtcaccggcgccaacggtgcttaccacttcaacggaaggcggcttggcaatccactctccggatgcgttaacccacagagcgccttcttcgccaagggagataaccacgtgggcaattccctgctcacgcagcgcatgagcggcttcaatcacatctttcatttcaggcagcttgcggcccgcccagatttccagctcgcgacggttaggtttaaccagccacggcgccgctttcagaccggcaaccagcgcttcgcggctgctgtcaaaaatgatgcacgggcactggctacgcagacgggtcatccagtcagtgaatgcttccgggctgacgccagacggcaggctaccgctcacgcaaaccatatcgaactggcccagccagctcagggaatcgttaacaaaacgctcccagtcgcccggcgtgacttcaaagccggagaagttgaaatcggtgacttcgccgtctttctccgtcagcttgacgttgatacgggtacggccctgaacaacctgaaaacggttagcaatgcccagctcgctgaacagctgctgaaaaccatcctgattgtctttaccgaggaaaccgccaacggtgacgtcgataccgagatctttcagcacttttgcaacgttgatccccttccctgcggcgtgcaaaccggtagtgcgaacaaggttaacctcaccgcgttcaatttccggggtaaaacccaccaggtcataggccgggtttaaagtaatcgttgcgacacgtctgctcatttatgcgccctccccaaggcctgcggcgatcgcttcgccaatcgcatccagcgcctgctgcgcatcatcaccctgcgcggtaaagcgcaagcggtgaccttttttcacgcccagcgccacgaccttcatcaggctgcggccgttggccggtttgcccgaaccatcaaggttggtgacggtaatgtcgctggagaattgtttaatggtattaaccagcatcgtgccgggacgcgcgtgcagcccgtgctcgttgcggataacgtattccgcgctgagaacatcttccgcaatcgcgtcgtcgctggtcagcagcgccagcagcgtggcgccatcagccttcagcaaacggtcagcttttttgtcgagcagcaaattgctcaggcgattaagcacggcggtcggctggtcatcggccatcgcgacggtgatcagtagagaaaccggctgctcatcgctggtaaaggcgttggccgcgcggctgacggcaacggcgctgcgcaggttgccttcggtgctgtcgttcagccagatgccctgaccgaggttcagcggtttatcattaatcgtacggctaacaaaggaagcatcgaccgcgccggcttctttcagccgagcggcattcagcgcctgcagggtcagcaggtcgctggcgacaacgtccagggtcagcgtctcgttatccagcttcagcgcttcgctctgcttttcacccatcaacagggcgcgcagctcttcagcggtcgtcgcggacttaagttgttcagcaacggagtcgtcgctcagcacgtgggtcagctgacgcagcagccccaggtgttcatccgagctggcggcgataccgatggcgacgtaggcggtttgcccttcgccccaggtcacgccctgcgggaactgatacacctgaacgccggttttcagtacctgatcgcgggtgtcggtggtaccgtgcggaatcgcaataccgttgccaaggaaagtggaggtttgctgctcgcgagccagcatcccgttgatgtagccgtctgccacgttgcccgcgctgaccagcgcggaggcaacctgacgaatagcctcttctttattaccggcctgctgaccgggatgaatatcctgcacagataactggaacatggttctcctctcctgctgaattgaatcgtttcagctactttgagaaaaaatgcgtcatctacctgccggagaatctcccgatgacgctgaaacgtttcaagaagtctgtacctttattagccgccaggcaagaaaagttcgttttctgataacagaagttagagatacagcacacttttgctgaagcgggagcgtcgaggccggaaaaacttcagctttctgctgaagtttgattttgaaacatctttttgatttattcgtgccctggtactgttcattttctgagtgacggcgtaaactccgcgactcctgaaaaccgatgaacgccgacatgcaaaacagtagcgccgccctgccacgacgcgggtttgatttcacctcttccgcctttctgatcgtcgccttcctgacgggtatcgccggggcactccagacgccaacgctgagcctgtttctgacgaacgaggttcacgtacggccggcgatggtcggcttcttttttaccggtagcgcggtgatcggcattctggtgagccagttcctagccgggcgttcggatcgcaaaggcgaccgcaagcggctgattgtcttctgctgcctgatgggcgtgctggcctgcgtgctcttcgcctggaaccgtaactactttattttgctgttcatcggggtatttctcagcagcttcggctccaccgccaacccgcagatgtttgccctcgcccgcgagcatgcggacaaaacgggccgcgaggcggtcatgtttagctcgattctgcgcgctcaggtatcgctggcatgggttatcggaccgccgctggcctacgcgctggccatgggttttggctttacggtgatgtatctcagcgcggcagttgcctttgtggtctgcggcgcgatggtctggttttttcttcccagcatgcgtaaagagccgaagatcgctacgggccatcttgaagcgccgcgcaccaaccgccgcgacgcgctgctgctgtttatcatctgtacgctgatgtggggaatcaacagcctgtacatcattaatatgccgctgtttatcatcaatgaactgcatttaccggagaagctggccggggtcatgatgggcaccgccgccgggctggaaatcccgaccatgctgattgcgggctactacgccaaacgtttcggcaagcgtttcctgatgcgcatctctgcggtggccggcgtgctgttttacgtcggcatgctaaccgtacatacccctggactactgctggccctgcaggcgctgaacgccatttttatcggtatcctggccggtatcggcatgctctattttcaggatctgatgcccggacaggcgggcgcggccaccacgctttataccaataccacgcgcgttggctggattatcgccggttcgctggcgggagtcgttgcggaagtctggagctatcacgccgtattctggattgcgctggtgatgggggtcgtcactcaggcctgtctgtggcgtattaaagacgtttaagggtatccgcgccggcttgcaccgtcacgaagtgctcagctcaagatgaagcagccaggtcatggcgtcttcgcgattggtggcgcacatttccgcttccggcttcaggctggcgcacactttcggccttaacggcgagccaaaaatagcgcagagattattttgcgatagctgcacgcagcgggtgtttgccggcttgccttgcggcatgcccgggatagggctggagatagaaggagcgatacagcaagctccgcattcagggcggcattccataatcgactcttccgataacgcttttagcagcccagcctaaacgttttacctgaagatagcaaaaccgacgaattccacttgcctgaaaggcccggcgcgagtagttttacgcgatattttcgaccctttaagtgacaggattaccgcaatgccaagagcgaatgaaattaaaaaaggtatggtgctgaattacaacggcaaactgctgattgttaaaaatattgatattcagtcacccagcgcccgcggcgcagcgacgctgtacaaaatgcgtttctccgatgtacgcaccggcctgaaagtggaagaacgcttcaaaggcgacgacatcgtcgataccgtcaccctgacccgccgcttcgttgacttctcctatatcgatggcaacgaatacgtctttatggataaagaagattacaccccgtatatcttcaccaaagagcagatcgaagaagagctgctgtttatgccggaaggcggcatgccggatatgcaggttctgacctgggacggccagctgctggcgctggaactgccgcagaccgtggatctcgaaatcgttgagacggcgccgggtatcaaaggcgcatccgcaagcgcgcgtaacaaaccggcgacgctgagcaccggccttgttgttcaggtgcctgaatacctgagcgcgggagagcgtatccgcatccatatcgaagagagccgctacatgggccgcgcggactaaactccgcgtttgcaacaccctggagggcagccagcggctgtcctttttattagccccttatccgcaatctccccctccgccaaaagctgttataccaataatagcgaagctaccgctaatctcaccggctctctccgcatactttgcggcctgaccgtttaccgcgacagaattgcatgatcaagttcacattaagcggataaataaggctcaccaatttaatttgttgtcatatatctttacactggccatgttaattattggttaatcaggtgtgttaagaatgacaaccattgcgacagccacgctgccggaaggcgtacagcttcctcgatacgatcgcagtcagctgcgttcgcgtattgtgcatttcggttttggcgcgtttcatcgcgcgcaccaggcccttctcaccgatcgggtgctcaacgccggcggcggagactgggggatttgtgagattagcctgttcagcggcgatcggctgatgagccagcttcgccagcaggaccacctgtttaccgtgctggaaaaaggcgccgagggcaatcagccgattgttgtcggcgccgttcatgagtgtctgaatgcgaaactggattcgctggccgccattattgagaaattttgcgaaccgcaggtcgccattgtctctctgaccatcaccgagaagggctactgcatcgatccggccagcggccagctggatatgacgcagccgcgcattattcacgatctgcaaaatccgacgctgccgcaatcggttcccggcattctggtggaagcgctggcgcgccgccgacagcgggggctaccgccgtttaccgtcctctcctgcgataatattcccgataatggacatgtggtaaaaaacgccgtgctgggaatggccgaaaaacgggaccccgagctggcgcagtggattgccgaacacgtcagctttcccggtaccatggttgaccgcatcgtgcccgccgccaccgatgagtcgctggcagaaattagcgcgacgctaggcgtggaagacccctgcgcaatcagctgcgaaccctttatccagtgggtcattgaagataactttgttgccggtcgcccggactgggaaaccgcgggcgtccagatgaccgatgacgttttaccgtgggaacaaatgaagctacggatgctcaacggtagccactcgtttctcgcctggcttggctatctggctggccatgcgcacattagcgactgcatgcaggatccgattttccgcagcgccgcctaccgcctgatgcttgacgaacaggcgccgaccttatccattcagggcgttgacctgacggcgtacgctgacagcctgatcgagcgcttcagcaacccggcgctgaagcatcgcacctggcaaatcgccatggacggtagccagaagctgccgcaacgtatgcttgagggtattcgcgtccatctcgctcggggcagccgctggccgctgctggcgctcggcgtggccggctggatgcgctacgtcagcggtattgacgatgccggaaatgcgattgatattcgcgatccgctggccgataagatgcagaaacgggttgctgccagcgatgaacaccagcgcgtggcggccctgcttacgctggaagagatctttggccgcgacctgccgcagaacccgcagtttgtcgctcatatcaccgccgcatggcatcagctcgccgcttttggcgcgcgtcaggcgattgccggcacgctgaacgcttaacaatttctgccttttagcggacagatcctccttctgtccgcggtaggacttctcttttcccctttttttcgtcaggatagcgtaactgttacaacattacatttaccctggagaaaaagtgaccaaaaccaatttgatcacggggtttctcggcagcggcaagacgacgtcgattctgcatctgctggcccataagcccgcggatgaaaaatgggccgtgctggtcaacgagtttggtgaagtgggcattgacggcgcgctgctggcggaaagtggcgcgctgctcaaagagatccccggcggctgcatgtgctgcgtgaacggtctgccgatgcaggtcgggctcaacaccctgctgcgccagggcaaacccgatcgcctgctgattgaacccaccgggcttggccatcctaaacagatcctcgatatgctgaccgccgcaatatacgagccgtggatcgacctgcgcgccaccttatgcgtgctggatccgcgccagctgctggacgaaaaaattgtgaccaacgacaactttcgcgaccagctggccgccgctgacgtcattatcagtaataaagccgaccgcgcaacggaggaaagccaacgcgcattcgccgcctggtggcagacctatgccggcgatcggcggttcgtcagcgccacgcgggggaatatcgacccggcactgcttgatttgccgcgccgcaatcttgcgccgcttcccgccagccccgaacacgcgcacggccacgggcagaaacagggccttgcggcactgagcctccctgcccatcagcgctggcgtcgcagcctcaatagcggccagggctatcacgcctgcggctggatttttgacgccgaaaccgttttcgacaccgtggccctgctcgaatgggcgcgcctggcgccggtcgggcgcgtaaaaggcgtgatgcgcatcgcggaaggagtggtacgcatcaaccgccagcagcgcgatctgcatattgagacgcagaacgtttctccccccgatagccgtatcgagctgattgccgataccgaaacggactggaacgcactgcaggcctccttgttgaggattcgtttaagttaagacggctatggttgccgtcgtttacccaacacacgatagttatgattaaaaatcgaattcccctaatcctgctgctgaacgcggcgggtgttgcgcttttttgttcatggtaccttcccgttaaccatggtttctggaatccgctggactcggcgatcttctatttctttaaccatctggttggcgtgagcaccgcttacacctggctgctggcgattatcaacaaccgcgcatttgatgcctgctcgctactggcaatgggcagcctgatgctaagcttctggtttaaagagcagagcgccggacgccgccgggtgattatcatcggcctggcgatgctgctggccgccgtcatcatcaatcagcttgcccagcacctgatgccggttaagcgcgccagcccttcgctctcttttaccgatatcaccaaagtgagcgatgtgatctccttccccactaaagatgcgtctaaagatagctttccaggcgatcacggtatgatgctgctgatttttgcctcatttatgtggcgctattttggtcgccgggcgtttgccatcgcgctggtcatattcgtggtgttcgcttttccacgcgtaatgattggcgctcactggtttaccgatattgccgtcggctcattaacggcggtactcattggtgccccctgggtattgatgaccccgctgagtgataatgtcattgcgttatttgagcgttatcttccgggtagaaaaactaaaaattaaatctatctttacaattaattaatatcattcataagggatcgttctgggtccctttttttgtccgcgcgttttttctcatccggcatcatcttcccgtcatagtaatcatgttagaaatgagtaaattgcgtattttttacccattgctgtcgctattttgccctttgccgatgattcactttttgtcgcaaaaatacttataagaaaatgcgtaaaaccgctcgccatcccccggttgatcgggtaacctcaatctcgttttgcctcgtcagcgacatcaattcagagaatgaataaatttgtgcgtcagtccacagttttatgcttacggaattgtctcattgcgaccaggtaattaggctctaacacgtttggcattttttataacgacattgtcgttaaggacaacaagggataacacacagcatggtcaaatctcagccgattttgagatatatcttgcgggtcgcccccgcgattgcagttgcggttctgctttccgcgtgtagttcaaatagtaccgccaggaatatgcattctgagacgcttgctgtgggtagtggcgatttatcatcactgcaagcctctcaggatgaatttgaaacaatggtccgcaacctggacgttaagtcccgcttgatggatcaatatgccagctggaagggcgtgcgttaccgcctcggcggcagcacccgtaaaggcatcgattgttccgcctttgtgcaacggactttccgcgaacagtttggcctggaactgccgcgctcgacttcagagcagcaggattccggaaaatcgatcagccgcgcgcagctgcgcaccggtgatttagttctgttccgtgcaggttccacgggccgccatgtagggatctacatcggcaacaatcagtttgttcatgcttccaccagcagcggtgtgacgatttcaagcatggatgagccgtactggaaaaagcgctataacgaagcgcgacgcgttctgagccgttcgtaatcgtcttctgccgttggttaatcccttggccaacgaaagaaataaaaaaaacactgccgaggcggtgtttttttttgctcgccagccaggaaacttcgtaaaataagcgatgtctttaagcagggatagaaaaagcgatttctatcagccccctggcgcaaatcaacaatacggactgactatatagcctatgcctacccgtcatctcgctccccggcgaaaaatctggctgaccagcatatgtgttggaatagccgtcgccctgctggccggtagcatccagtttatggtgatttatcacaaccgcgcggagcgtttcgacgccattattcataacgttcatacgtatctgcaggactactttcacgatttgaagcagacgattcagggcatgcagccgctggtcgatcaaccctgtgaaaacgttgcctcaggcttaaccgcccatgcggcattcagcccgaacgtccgcgccatcctgctggtcaaaaatggccttgcgttttgctcctccgccacaggcgctatgaacacgcccttaacccagctcattccgcagcttaatcttactcaagcggtcgatatggcgattctgcccgggacgccaatgatgccgaaaagcgccgcgctggcgctgtgggtccgcagcccacacggcgggaaagacggtatttttgtctcgattaatgccaacctgacgccctatattctctactcagcccgacagaatgatttcagcggcctggcgctggccattaaggacaccgccatttccaccttcagcaaccaacttatcgacccgcagacgctgctctcgccgcccattcgccagacgcaaatcgacggcctgccgctgaaggtttatctctacgcgaacagctggctggcggagaatacgcagtttgctctgctgctgggcgtcgtgtgcgggctgctggccgggcttttaagctactacatcctgacgattaaatcggacccgcgcaaagagctgctgctggcgatcaaaaacgatcagttctatgtggtttatcaaccggtggtgaggtcagagacgctgcgcatcagcggcgttgaggtgctgatgcgctggcgacatcccgtggccggcgagatccctcccgatgtgtttatcaaccttgctgaaacccagcagatcattattccgctcacccgccatctgttaaaactgattgcgcaggatgcgcctgttctgcaaacgctcctgcccgcagggagcaagctgggaataaatatctccccccttcatctgcacgcaggcagctttcagcaggaccttcagcacttcgccgccgccatgccggccggccattttagcgtggtgctggagatcaccgagcgcgcgatgatcgataaaaatcgatccttagggaacttcgactggctgcacgaacagggctttgaaattgcgattgatgattttggtaccggccatagcgcgctaatctatctggagcgctatgactttgattacctgaagatagaccgcggcttcgtgcaggctatcggcactgagaccgtcacctcaccggtgcttgatgccgttatcaccctgagccgccgcctgaagctcaccacggtcgctgaaggggtggaaacgcaggaacaagcggaatggctgcgcgaccacggggtaaactatttacagggctactggttaagccggccgctgacgctggacgcgctgatcgccgcccatgatgaaccggcgaaatatttcacaagccgctaagggtcctttattatttgctatcaaaggtcaggccgcttcaggtctgacattggagggcgtcatcctggttatttttgcacgcatcagcctgatcctgctgaccttatttagcctgcagagccaggcgcaaacgattaaagagagcgacaggttcgctattatcggcgaaccgaaatacgccgcgggctttgaccattacgattatgccaaccccgccgcgcctaaaggcggggcgattaccctcgcggccatcggtacttttgataatttcaatcgctacgccatgcgcggcaaccccggtattcgtaccgaaagcttatacgacacgctattcaccacctctgatgatgagcccggcagctactatccgctgatcgccgagcatacgcgctatgccgatgatttttcatggatggagatcgcgctcaatccccgcgcccgctatcacgatggcagccccgtcaccgccagcgatgtcgcgtttaccttccagaagtttatgaccgaaggggtgccgcagtttcgcctctattataaaggcaccaccgtaaaagccatcgctccgctcaccgtacgcattgatttagccaaaccgggcaaagagaacatgcttagcctgatgacgctaccggtgatgccggaaaaattctggaaaaaccataaactcagcgacccgctatccgccccaccgctggccagcggcccgtatcgcatcaccgcctggcgcatgggccagtacattacctactcgcgggttaaggactactgggccgccgacttaccggtcaaccgcgggcgctggaatttcgatacgctgcgctacgactattacctggacgacaacgtcgctttcgaagcctttaaggccggcgccgtcgaccgtcgcgaagagaacgttgccaagaactgggctacccgctacgtcgggcgcaattttacccacggctatatcgttaaagatgaatacaccaacacctcggcgcagaatacgcagtggctggcctttaacattcagcgcccggtattttccgaccgccgggtacgcgaagccattaccctcgcctttgattttgaatggatgaataaggcgctgttttatcactcctacagccgcgccaacagcttctttcagaataccgaatacgcggcgcgcgattatccggatgccgacgagctggcgctgttaacgccgctgaaaaaagagatcccggccgaagttttcacgcagatataccgccccccggtttccagcggcgatggtttcgaacgcgcaaacttgctgaaggcggatgccatccttaaccaggcgggatggatagtgaaaaaccagcggcgggttaatgcgaaaagcggcaaaccgttacgctttgagctgctgcttccttccggcagcagcgatcgctgggtcctgcccttccagcacaacctccagcggctcggcatcgtcatggatattcgccaggtcgacaactcccagtacagtaaccgcaagcgcagccgggattacgacatgatgcccaacgtctggcgcgccacgccatggcccggcaccgacctgcaagtctcctgggactccgaatatattaactccagctataacgcctcaggggtacaaagcccggccgtcgaccggctcatcgcgcagattattcgctggcagggtaataaagaaaagctgctgccgctgggccgggctctcgaccgcgtgctgacctggaactattacatgctgccgatgtggtatatggcgcaggaccgaaccgcatactgggacaaattctccttcccgcagacccgcgcggtctactcctccggtttcgaaaactggtggtacgacgcaagcaaagcggccagactccccgcggacagacgctaaggaattaagatgggtgcatatctgctccgccgactactgctcatcatccccaccctgtgggcgattatcaccattaacttttttattgtgcagatcgcgcccggcggtccggtcgatcaggcgattgcggcgattgagttcggcgaccgcggcggcttgcccggcgccggagatggcggcatggccgccagccatgcgcgtaccggggtcagcaacatcagcgatgggcactatcgcggcgggcgcgggctggacccggaggtgattgccgagataacccaccgctacggctttgataagccgctgcacgagcgttattttaaaatgctcggtgattatctgcgctttgattttggcgatagcctgtttcgcagctcatcggtactgcagctgattaaagacagcctgccggtctctatcaccctgggcctgtggagtacgctcatcatctacctggtgtcgattccgttggggatccgtaaagcggtcagcaacggcagccattttgacgtctggagcagtacgctgattattatcggctatgccatcccggcgttcctgtttgccattttgctgatcgttatctttgccggcggcagctatttcgatctctttccgctgcgcgggctggtgtcagccaacttcgacagcctgccctggtaccaaaaaatcctcgactatctctggcatatcaccctaccggtgctggcaacggtgatcggcggttttgccgccctcacgatgctgaccaaaaacagctttcttgatgaaatccgcaagcagtacgtggttaccgcacgcgccaagggcgtcagcgaaaagcagatcctttggggccacgtgtttcgtaacgcgatgctgctggtgattgccggtttcccggccacctttatcagtatgttttttaccggctcgctgctgattgaggtgatgttctcgctaaacggactgggactgttgggctatgaggccaccgtatctcgcgattacccggtcatgttcggcacgctctatatttttactctgattggcctgctgctgaatatcatcagcgatatcagctatacgctggtcgatccgcgaatcgattttgagggccgctaatgtcattttttagtcccgtcaatcaggcccgctgggcgcgttttcgccacaaccgccgcggctactggtcgctatggctctttttagcgcttttcgcctgtagcctgtgcgcagagcttattgctaacgataagccgctgctggttcagtaccgcggcagcttctacgttccgctcctgaaaaactacagtgagaccaccttcggcggcagctttgccaccgccgccgactatcaggacccgtggctgcaaaaacggctggcggataacggctgggccctgtgggcgccggttcgtttcggcgcgacgaccattaatttcgccaccgacgcgcccttcccttcgccgccgtcaggacagaactggctgggcaccgatgccaacggcggggacgtgctggcgcgtattctgtacggcacgcgcatttccattctctttggactgctgctgaccttcttctccagcgtactgggggtgatggccggcgccgttcaggggtattacggcgggaagattgacctctgggggcagcggtttatcgaagtctggtcgggaatgccgacgctgtttttgattatcctgctctcaagcgttgtacaggccaacttctggtggctgctggccattaccgtgctgttcggctggatgacgctggtcggcgtggtccgggctgagttcctgcgcacccgtaactatgattatatccgcgccgcgcaggcgctcggcgtcagcgatcgcgccattattctgcgccatatgctgcctaacgccatggtcgccaccctgaccttcctgccgttcattctgtgcagttcgataaccaccctgacctcgctcgatttcctcggctttggcctgccgctgggctccccttcgctgggcgaactgctgttgcagggtaaaaacaacctgcaggcgccctggctgggcatcgccgcctttctgtcggtggcggtcctgctgacattattgatttttattggtgaagcggttcgcgacgcctttgacccaagcaaggcggtgtagcatgacgcaacctttgttagatatcgataacctctccatcgcctttcgccagcagggtgagacaactcccgtcgtcagcgaactgtcgctgcagattgccgtcggcgagaccctggcgctggtcggcgagtccggctccgggaagagcgtgaccgcgctatcggtgctgcggctactcccgtcgccgccggtcagctatcctgccggcgacatccgttttcacggccagtcgctgctgcacgcggatgaacgcaccctgcgcggcgtgcgcggtaaccgcattgcgatgatctttcaggagccgatggtttcgcttaatccactgcatactctggaaaaacagctgtacgaagtgctctctttgcatcgcgggatgcgcaaagaagcggcgcgcggggaaatcctcgactgcctcgatcgcgtcggcatccgcagcgcgccccggcggctggccgactatccccatcagctttccggcggcgagcgccagcgggtgatgatcgccatggcgctgttaacccgcccggagctgcttatcgccgacgaacccaccaccgcgctggacgtgtcggtgcaggcgcaaatcctcacgctgctgcgggagctgaagcaagagttgaatatggggctgctgtttatcacccataatctgagcatcgttcgtcagctcgccgaccgcgtcgcggtgatgcagaacggccgctgcgtggaacaaaacggctgccgggcgctgttttccgcccccgaacacccttatacccgccgcctgctggatagcgagccgtcgggcgatcccgtcccgctcgcacccgatgccccggtgttgctgcgggcggaaaatttgactatcgccttcccgatacgtaaaggtctgctgcggcgagttgtcgatcataaccgggtcgttaacgccctcagctttcatttgcgcgcgggagaaacgctggggctggtcggcgagtccggatcgggcaaaagcaccaccgggctggcgcttctgcgtctgattcattccgatggcgcgatcgcctttgacggtgaggcgcttcagggacgtaatcgtcggcagatgctgccgctgcgtcgtcgcatgcaggtggtctttcaggatcctaactcatcgctaaacccgcggctcaacgtgctgcaaattatcgaagagggattgcgcgtccatcaaccgacgctcacgccggccgaacgggagcaggcggtgattcaggtgatgcaggaggtcggcctcgatccacactcacggcatcgctaccctgccgccttctccggcggccagcgtcagcgcatcgcgatcgccagggcgctggtcgtcaaaccgcagcttatcgtgctggatgagcccacctcatcgctggataaaaccgtacaggcgcaaatcctcgcgctgctgaaggcgttacagcaaaagcatcagctggcctatatttttatcagccatgatttacgcgtcgtgcgggcgttgtgtcatcaggtgatggtgctgcggcagggggaagtcgtcgagcagggtgagtgcgagcgcgtatttaccgctccgcagcaggagtatacccgtcagctgctggcgttaagctgacggtcagaagggattgttgccggagaaaggttccgcaatcgccacgccgaaatttttcaggcggcaggttgcagcgaattcgtcctgacggttaacaaacaggcacggttccccttcgcattcaacgacagagctgtcgacctcgatgtcgctaagcgcctggctgagcttatgcatgaccggccacgcgctttcgccatcggggctgagtaatttcaacgccacgaggctgttttcgctctgggcgccgttttgcggaatcggttcaactcttgaacctgcaaaaccggccagccagcgatagctctgcggcagacggtgtacgatagagagttgcagtgtattcacgtgtttaccccggaagcaaaatacttcacaataattttacatcaatactaacacattattgacaaccagtcctcttcctgcacagaaaacgcttacaccagtggcatagccgtgttattggtttgtaatgtaaaagtttataattgtgcagatggaacatcttcgggctatatgtacccgtttctgtgatctaaaacaacttttttatcgcaatcatgcgactttttgaacgatttgattttacataaaataaacaaatcgctgaacagagaagccagatttggttgacatgcatcaaaaaaaggggcgatatcgcccccctgaagtcgcttagcgcgcggctttgcgccgtcggctggcgtagaggtaaaagaggatggagctgctggcgcagaaggcgatagaaatcagcattggccaggcggtggtaaacgtcgccatcgacagcagcgcgccgacaatggcgccaatcccgaaacggaacgtccctgccagcgaggaagcggtcccggccatatgcggaaactcatcgagaatcaccgccatcgcgttagaggagaccatcgaaacgcagccgatgaacgccgccacgccaaacaccagcgcccagaaccccacgccaaacagcgcgcacacgaccatccacgccgccatcgcaaactggatccatagcccggcgcggaacatgttcagcgccccaacccgccgcacaaagcggctgttgatcatggtcatgacaaacaggaagacgacgttcagcgcaaaatagtagccaaagtgctgcggtgaaacgtggttgatattgatatagacaaacgggccggcgctcagaaacgagaacatcccggcgaagctgaaaccgcttgccagcatatagctcagcacccgcttgtggcgaaacagcgtcgcgaagttgccgagcgtagtgcgaatatgaaatttctgccggcgttccggcggcagggtctcgctaataaagaaggcgatcatcgccgaggctaatagcgccgccaccgcgaggatccagaagatcgcatgccagctaaaccacaccagcaccgctccgccgaccatcggcgccaccagcggcgcgacggtggtcaccagcatgacgaacgacatcatccgcgagaactcttccttgggatagatatcgcgcatcagggcgttaatcaccacgctcgccgccgcggccgccaggccgtggaaaaagcgcatggtgatcagcatatcgatagtctgcgacagcgcgcaggccaccgccgccgcggcaaaaaccagcgtgccccccagtatcaccggtttacgccccatgctgtccgccattgggccatataaaagctggcccagggcaaagcccagaatataggtactgagcgtcatctgcgcgctgccgtccggcacattaaactgcgccgcaatcaccggcagcgccggaagatacatatcgatcgacagcggcattaacatggccagcaggccaagaataaacacaatccctaatgaagaattctgctttgccgtcacgttttactccgcgcatgttggccgccaacgctggcaatttcttctgccgtcagcggacgatattcacccggcgccagcgacgcatcaagcgcgatatcgccaatacgttcgcgatgcaggccaaccacatgattccccaccgcggcaaacatccgcttcacctgatggtagcgcccttcgctaatggtcaggcggacttcggtcggcgtcaccacttccagcaccgccggtttggtcaggtctttctcattatgcagctgaacgcctttggcaaactgctcggcggtggactcatccagcggattttccagcgtcaccagataggttttttcgcaatggtggcgcggggaagtaatgcggtgcgaccactggccatcgtcggtcatcaataccagtccggtggtgtcgatatccagacgccccgcggcgtgcagcttgtgcgccaccggctcgtcgaggaaataaaggaccgtcggatgatccggatcgtcggtggaacaaacgtaaccctgcggcttgttgagcataaagtagcgcgggccggtctgctgaaccagcgtattgccgtcatactcgacgtcatgctccggcagaagcttgaaggaggagtcttttacaatgtcgccgtccacggtaacgcggctgccgcggatttcacgcccggcaatagcccggctaacgccaagttgctgagcgataaacttatcaagtcgcatgagatttttttagcctgtacaagtgctggagcgggcaacgcgcccgaaaaagaagaatttcatggggtagtataacgggctattaacaccactcaagggaaaagattcgtggcatactattcgcgagttaattaaccgccataaattcatgacatttacattacgtccctaccaaaaagaggcggtcgacgcgacgctcgcctggtttcgccgccatcatgaacctgccgcgattgtgctgccgacaggcgcaggtaaaagcctggttatcgccgaacttgcgcgcctggcgcgcggtcgcgtgctggtgctggcgcacgttaaagagctggtggcgcagaaccacgccaagtattgcgcgctcggcctggaagcggatattttcgccgcgggcctcaagcgtaaagagagccacggtaaagtggtctttggcagcgtgcagtcggtcgcccgcaacctcgaccagtttcagggcgagttttcgctgctgatcgtcgacgagtgccaccgcatcagcgacgatgatgacagccagtatcagcagattatcagccaccttcagcaggtcaatccgcacctgcgcctgctggggctgaccgcgacgccttttcgcctcggtaaggggtggatttaccagttccactaccacggcatggtgcgcggtgatgaaaacgcgctatttcgcgactgtatctacgagctgccgctgcgctatatgattaagaacggctacctgacgccgccggagcggctggatatgccggtggttcaatatgacttcagccgcctgcaggcgcaaagtaacggcctgttcagcgaggctgatttaaaccacgaactgaaaaaacagcagcgcgtcacgccgcatatcgtcagccaaatcgttgaatttgcccaaacgcgcaaaggggtgatgattttcgccgccaccgttgaacacgcccgcgaagtgaccgggttgcttccgcagggcgaagcggccttaatcaccggtgaaacgccggggccggagcgcgatcgcatcatcgacgcgtttaaagctcagcagtaccgctatctggttaacgtcgcggtactgacgaccggctttgatgcgccgcatgtcgatctgatcgctatcctgcgcccgaccgagtcggtgagcctttaccaacagatcgtcggccgcggcctgcgcctggcgccgggtaagacggactgcctgattctcgattacgccgggaatccgcacgacctttacgcgcctgaagtgggaacgccgaaggggagaagcgacaacgtgccggtccaggttttttgcccggcatgcggtttcgccaataccttctgggggaaaaccaccgccgacggcacgctgattgaacactttggccgccgctgccagggctggtttgaggatgacgaaggccatcgcgagcagtgtgattttcgttttcgctttaaaaactgcccgcagtgtaacgcggaaaacgatatcgccgcccgccgctgccgcgagtgcgataccatcctggtcgaccccgacgacatgctgaaagccgcgctgaagcttaaagacgcgctggtgctgcgctgtagcggtatggatctgcagcacggcgcggatgacaaaggcgcctggctaaaaattacctattacgatgaagatggcgcggatgttagtgagcgcttccgcctgcatacgcccgcccagcgtaccgcctttgagcagctctttatccgcccgcatacccgaacgccgggcgtgccgctgcgctggataacgcccgccgatatcctcgcccagcaggcgcttctgcgccatccggactttgtcgtggcgcgcatgaaggggcaatactggcaggtgcgggagaaagtatttgattatcagggccgattccgccgggccaacgaactgcgctaatcgccctcacgtctgaggttttggttgctgcaaacacctatggcggctataatgccgcccgcttttgcattcgcaaagcagataatctgcctgctgctgggtcgcctgtagcaggatttatatatagagagacatcaatgtttactatcaacgcagaagtacgtaaagagcagggtaagggtgcgagccgccgcctgcgtgcagctaacaaattcccggccatcatctatggcggcgaagctgcgccagtagcaatcgaactggatcacgacaaagtgtggaacatgcagaccaacgctgagttctacaacgaagttctgaccatcgttgttgatggcaaagaagagaaagttaaagctcaggctgttcagcgtcacccgttcaagccgaagctgactcacatcgacttcgttcgcgcttaatcgccgactgaaagttgtatggcaagcgccccgctccgcaaggttcggggcgttttgtttatcagtcgagtagcgttgacctgttcagcgcaagatgctgcaccagcataatcgttttcgcatcgacgatttccccttcgcgaatagcctgcaacgctttttccagcggccactccagcacttcgatatcttccccttccgtcgccagtccgccaccgtcgccgcgccgatcgtcggcagagtattcggcaatgaaaaagtaaagcttctccgtcaccgaaccggggctcatgtaagcggtgaataccggctcaatacgcgtgacgcgaaaaccggtctcctcttcggcttcggcaacgatgcgcgcttccggggaagcgttatccagcagtccggcggcggcttcgatcaaaaatccatcatgaccgttaatccacaccggaaagcgaaactggcgaaccagcactaccgtttgcttttcacgattgtagagcaggatcaccgcgccgttgccgcggtcgtaagcttcccggctctgctcctgccagcgtccgtcccggcgcaatagttcaaaagtatatttcttgagcgtgtaccagttatccgataacagcgtttcgcggatatggcgaacgcgcggtgcgtcagcgtgcatgtttttccccttttaggtgacagttagcaacataacatgcataatcgtgcacaaacaagatcactcatgaaggtattttgatgctcgccagccagagaaaacagcagattttgcagatcctcgccgaggaaaaacaggtgatgtccggggatctcagccagcgctttagcgtatcagaggactccattcgccgggatctgcgggagctggccgcggaaggcaagctgcagcgcgtccacggcggcgcgctgccggtttccgaagccatcgcgcctattgaaacaagaaagaacgtgcaaatcgcctcaaagcagagcattgcccagcgcgcggttgagctcattcagcccggtcaggtagtggttgtcgacggcggcaccaccaccggggagatggtgcgcctgctgccggataacctcgcgtgtaccgtggtcacccatagcccggggattgccgtcgcgctggtggaaaaaccgctcatcgaggtgattttgatcggcggccggttgtttaaacattccgtcgtcagcgtcgggtctgcggccctcgagagtatttcccgtatcaacgccgatctgttttttatgggcgtcaccggcgttcacccacgggcgggattcaccaccggtgactatgaagaagcgggcattaaacgcgcgctggcggcgcgggctgccgaaacggtggtgatggcgtcacaagaaaagcttaactccgcgtcggcctttgccatcggcgagctgggggcagccagtacgctgatcgtggatacgaccctggacgaggcgctgcgacagcagctaaccctggcgggggtagaaatcctctacgccctgtaatgcgggttcaggcaaaaaaaatcccgactcgacgtcgggattttacgcattaatttccgccagaagtacggcgctgtagctggtcgcgcaggttcggcggcgtgccttttatggttaaggtatccgtagccggatcccagaacacccgctcgcccagcagcatagcgtcaaaattaatggttaacccgccgccgctgccggcaaacttggttaactgacgcagcgtgctgcgatccgccgggaagctctcttccagctcgtagccttgttcggcggtaaattcctgaaaggtcttctcgctgacgcccgccagctctttcgacagcgactccagctcgatttcctcaccggcctgcagctgttcgttgcagtagctgtatacctgctggcgcacgttttgacgttcagatttatccagctgcgcatcggcggcgaaatcatccagcgcctgcagcaggccgcggttctgcgctttggcgttcagcccttcgctggcgccgaggaaatccataaagaaatccgccaccttgcgccctacccgccccttcaggaaggtcagatagcgcgttgactccgggttggtttcccactcggttaaatcaatacgcgcgacgatatccgcgtgattgatgtccagataatgggtggagctgatatccagctcttcgttgactcgcatgctgcttaggttgttcagcaccgccaccatcagatattccaccgccagataacgatactggcaaaacagcacaataccgccttctgcaaagggatattttgccagttcgtcgcgcaggcgcccggtagcggcgcggctaaacggcaggaacgcttcttcgcccttacgctgcccgcgcagcgcctgcgccagctcgctctcttcattaaacaggccgtaggctttattttttgcgctgtagacacgatgtagttcggccatcatctcgacaaccgtcgccgtcggctccagcaacgattcgcgcagcaccagctccagattttgttcatcacgtttgattaactgatgcagggcaatctggtcgatatccagactcatgttaaactctccttttagaccgggcggtattcaaccaccgcgggggcaacgacgcaaccgccgagtgactctttgcgagcgaagccgcgcgcttttgcgtcgtggcgaaaaaatgcggaaaaaaagctgctgctacggtaatatgttgccctttcacgaacaaacagattttgagtttatgccgcaattatcccgctatagcgatgaacacgtcgaacagctgctcagcgagctgacgagcgttctggaaacacataaagcgcccgttgacctttcactgatggttctgggcaatatggtgactaacctgatcaacagtagcgtcgcgccggcgcagcgtcaggccatcgcccgttcttttgcccaggcgctgcagtcatctatcaacgacgatccagcgcactaaggataacgaacaacagtatatggtgactcttcgtcagccctaccgagaaaaagtctcccagatggtcagctgggggcactggttcgcccttttcaacatgttgttggctatggtgctcggcagtcgctatctgtttgtcgccgactggccaacgacgcttgccggacgcctcttttcgtacgtcagcctcgttggtcacttcagcttcctggtctttaccagctacgtgctgattcttttcccgctgacttttatcgtcgtctctcagcgcttaatgcgctttatctcggttattctggcgaccgtgggcatgacgctgctgctgatcgacagcgaagttttcacccgtttccacctgcatcttaatccctttgtctgggaactggttatcaaccccgaccagaacgagatggcgcgcgactggcagctgatgtttatcagcgtaccgatcattttcctcctggaaatgctcttcgcgacctggagctggcagaagctgcgcagcctgacgcgccgccgccactacgcccgacccgttgcctggttcttctttatctcctttatcagtagccatctggtctatatctgggcggatgccaacttctatcgtccgatcaccatgcagcgggccaacctgccgctctcctatccgatgacggcgcgccgtttcctggaaaaacatggcctgctcgacgcgcaggactaccagcgccgtctggtggaacaaggcgcgccggaagccgtctcggtgcaatatccgctgagcgatctgcgttatcgcgatctcggtaccggttataacgtgctgctgattaccgttgataaccttaattattcgcgctttgagaaaaacatgccggcgctggccgggttcgcgaaagacaacgtgaactttacccagcacatgagctccggcaacaccgctgacagcggcatgtttggcctgttctacggtatttcaccgagctatatggacggcgttctgtctgcgcgcatccctgcggcgctgattacgtcgctgaatcagcagggttatcagctgggcctgttctcatcagatggctttagcagcccgctctaccgtcaggcgctgctgtcagatttctcactgcccgtcgcgaaagcgcaaagcgacgagcagacggcaaaccagtggattaactggctggaccgctacgcccaggatgaaaaccgctggttctcgtgggtttcgctcaacggcactacctttgacgacgggcagcagcaaaacttcgtccgccgctacggtaacgccgcgggcgcggtcgatacgcaaattggccgcgtgctgaacgcgctgcgggaagcgggcaagctggacaacacggtggttatcgtgaccgcgggccgtggaatgccgctgaacccgcagcatgagcagtttggctggtcgcgcgagcagctgcaggttcccttagtgatccattggccgggcacgccggctcaggagatcgcgacgctgaccgataataaagacgtgatgacgacgctgatgcagcgtttgctccacgtctctaccccggccaacgagtattcgcaaggtgaggatctgtttagcgccgcccgccgtcgtgcctgggtcaccgcggccaatagcgatacgctggccattaccacgccgaaattcacggttgtgcttaatcacaacggcacttaccgaacgtggaacagcgacggcgagaaaattaacgatcaaaaaccgcagctcagcttgctgctgcaggtgctgaccgatgaaaaacgctttatcgctaactgattgattatttataaatcaatcagtcatttcccggcttgcattcgcttggggaacgggtaatattgttccccacgaatcggcacgtagcgcagcctggtagcgcaccgtcatggggtgtcgggggtcggaggttcaaatcctctcgtgccgaccaaaaatcccagtaaaaccagcctcttaaggctggtttttttatgcctgttttttgcgcgtggagttaatggggtgaaactggggtgaaaccccgacaaaactacatgaccgggcaatcatcaaactcccctaagccacgtttccattgacgcctggagctggctgatccgctgacgaaacgccgcgatatccgcttccgccttagtatcaaaggcttcgctgcaggagtgctggtcctgtagtttttgaaaaaatcgtgattttgccgacatacttttactgtccgtcaggaaattagaggtgggtctgtgcatcaagatactgctgctgtttaaggtagcgtatcagcacgcgcccttcaggcatgaacgccgtgccgtaacgcaccagaccgatgcccctgagttcggcatcaatggcataacgcaattcccccggaatagtctgctcaagcagaaccacatcaattttcttaagccgcggctcgtacttcagcagtacagccgataacgctcccatcagttcatgggcagtccctggcatcccctgcaggattttagtcatatccggcagaccgtagtccggcaggtgcgccagcgtaccggcgcggcagttgaggatacgctgcatattgtccagcacagaaatgatggtctggttctgctcgctgacctgatacagatcaatgccgccagtaaaattgccgtagagcgtttcatatagtgacggacggggtgactcactcatctttcagcgcctgcagggtcagccggttgttgcccgcttcgatgacgcgtgccttatccggatcgaggtcatcgcggctcagcaccacccgccaggtgttgttctcctggtccggcgacataaacatgccagccaccgcaacatactgcgcggtttcctccatcggcatatccaccatcaccgccccacccggctgcagacgaatatctttctccgctatcaggtctgctttaatagcctgactgtcagccttaaacagtgacgggtagtccgtcgtgtcgaaggtttttcggtccttgagctggtaaatacgtaccaccgtcgacagtgccacgccgcctgcattgctgttgacggcctcgcgggcgcgaatatccagatgcagggtctttatctgcttataaaaaattgatttagtcacggcaacggtgccgtctgtcactttttgcgtcagcccacagccagcgagtatcagtgtgatacccgcggccagcgcaatctgaggaaaattaccagcgataatcgccatcttcatcggtctccctgcggtgaatattttcctggacccgctcatagcggccaagattgatgtttataatttgagggtgtacgacggtattcgtcgcattcagcggccgcatcacggcggtgcggcccagctgcactgcaccagctttgggtttagtactcatcgtcgcatccggcagcaggcaacggtcgacacataactgcaggcgcacatcgagccgtgagccaagatacacatgcagcagagccattaaatccgtgtgaagctccccgcccggtagccagcccggcacttcagccgggtcagtggtggtcagacgcatcagtacctgactattcacatcggtggcatagttacccatcaccggacggtttgtcagggtgacgggctggctgacgctcatggtcaggggcttcttcagcggcacgcggcgtttgtcgtggtgccagatttttacctgcgtgccgggtgccagcagacgcaccagtgaggccatgccttctgcagtcctccccggcagcatcatgaccggcagcagcgccagaaagcgtgaggctggcgcggcgatactgtctgtacagccgtcaatcccgagcccggccagccccagcaggtactgcgaagttttgtccttaccgccttcctcaaaagttgccggatacgaatatttccgccagatgcggtagtactgggcaatcagccggtgattgaagatatcgaggaaatccgccgtggcctcgtacccttcccgccgctgggtgatatcatcgatatagtgcgtcggcagcggagactccacgccataaagccccataaaggtgatacgtaccgtcggcggaagatgcgggtactcagcagcgtcgaatgacctgatttctgaagccgggaagcccatccccgggtgcggcctaaaacgtaccggctcatgacgtacctgccaggtgctgcccgtaaccggtttgtccggctggctctgctccagcaactgacagaagcggtaaaaattgatatatggcagccggtcacccagccgctccatcagcctggcaggcgcggactgtgattctctttccaccggatgcattttccttctggctgaacgatgagggtaagctggttgaactggttcatatcgacatacaacgcaaaaaaccggttaagcatttcaccaaacagatgaatatcgccctcaccggtaaaaccattgctgtcgagggtcacttcgatatccaggccccgtagcaggtagccctgctcaaagcgctgaaggcggtgatgctccacatgctgaatagcctccagacgccgggtgttcagttcatcttcctgccagttatagagcgcaagcgtcccgcgcagcacttcagcggtactcagcatattcaggaatccggagcccaggtggctcagcacccgccagtggaatcggtcttccgcaggcgggtagaccggcagcgtcggtttgcagaggttgcgtactgaaagcggtgtactgaccacctgctcacagcgatccagcagcgtgctctgcaatgcccggcgtggtaactgaccgttggtgccggtgatttgtagcgacacggcttcgcggtcaaggaggcggtcatcttcccactggtgaccgccgaggataagccaggtgtcatacagcccggtcacactgcgcttcacgcgggtatggtagtaacgcggtggtgcctggcggcgcatcatcccgcctttatggcggaaggagctgaacggcacatactccgcgtcgttcgtccggtttgagccggtgaccgaatccacggagtaaatctcggtgtgtccgtcctgcagccgtttggggcgcagcaggtactcactttccaggcccgtaatggtgagcgggtccgcctccagggtgaacagattaatcaccggcacgcagtgcagtcgaaccgcgtcatcggtgaccggcagatcagacggccacggcgtgctgaataccacttcaatgtcgaagtactctgtcccggcaggcggcgtgatgccgtccaggccattaaagtggacaaacataaacttgtcgcggaaggtgaagtactccagcaacaactggtagccgctgaaggcggtatcccccttcggccacagcccgtcttcctccgaaaatcctcccggcgagaagtacccgtcaagccggatacgatcggtctgcccgggcagacgcatatacagggcagcctgtcgtttcgtgagcatcaggtgcagctgactgctgacgggtgcatctgcgccgagatagaggctcaggcggctgaggtcggcatgcgaccagtccgcctgactactgcaggccatgcgcatccgcaacagcgaacgtccgtcaggttcggtggtcatggtgaccgctgagacactcaggggattgagcattacatcctgggtcgtacggtaacgacagaccgtgttcttcggccccaccgggcgggagtacacctccaaccccgcgggcacgacttcggccattttcatggcatgcagcgctggggtaagtgccaccaccgaaagcgacggaatggtacgcaggtaatgcggccagagcatactgaccagcccttcggtgagttccggcaggtcgtcgtcaatcttttcgcgcagccgtcccatcgagaaagcaaagccttcaaacaggcgttcgacatacggatccggtgtaccagctttatccaggtcgagcatcgctgcacgatcgggatgggtttgcgcgaactcttttgcggcttcacgcaggtagcgcatttctgcatcaaaatagcgcagggtctgatctttcatatgcgttccagcaggagttaaccctagtgttgttgcccgatgattaagcgtagaaatgtgagggagacagggaaaaatacgatatctgcagcaagggccacaggtgtgagcacaatgttggtagcaagattcttcggataaaaatcggtttcattgtcggtcgcgtaaaattcaactttatactttcgccccagtgactcggtattggtgaatgtataattgagacttttccttggaagaactacgccctcaatattgacatctttccagtatccccccttcgagttctggaagcctgaatgcttaatgacatctatatcgtattctgaaagctcaccttcgcttttattaacccagacacgtaacgaatccttaaagcgaaagatagcatccccttttacagaacgagccaactgaagcttgagcgtattttcttctttatctgcaatcagtgggattttgtctgttaatttgtttaaagacagtaactcatcagccccccttgtcagaatatagacatttctttcacctaaaaatgcgataccttccgaaggaataatcagaggtatattggtcttatcctgaacaacagaagcggagatattttcatactgaaaaatatcggtgacactatcctgcattttcataacattcacccgatgactacctgagactttatttcctccccacaaaattgcagtacacccggacagtaatagcaccatgacaatgcatgctgcaaatttagttattttcatgaaagtttatattcctgaaatcattaatatcactggcatcatttccggcacacatttctttgcattaaccgcacaggactgccgcgcgggcaggatcgatagcaattagcccagcaagcaggctgtccatttcagcgtgcaggcgagctttgtccgactcagcccgacccgctttaattctcagcagcttcagatggcgggcctgtacctcaaacagcagctcagactcccagttcgtaagggtgcagctatggaccaaagcgctccagcagaccggccagcagttcaagtccttcagccagtccctgttcaccttcgcggtgcagcttcgcccggcagtagtacgtcgcgacgcgaatgtctttcgcggtcgtggtcagcagcttctctgccagccggcagatgagttctgtatccgcaccggaaagtttgttgacctcctcgcgcatctgctgaaagtcatcgtcatagcccgggtcttcgccagcgggcgattgcccggacagcggctgcagccagctgccccactgcgccactcgctcacgggttgctacaagtaatggttcctgttctgtctggcaggcgctcagtaatgtattcagcatgctcatcagtagacctcttctacttcgctggcctcgctggcgaccaggcctgattcggccacgccagtcgtgctgaaaatcgtctccggcagacggaagttgcgcagtttcagcagcgccagtggcccctcgcccgcctcggtacgcagggtgtaattgagcgtgcgcccgtcctgtgctttccagctcaggctgtaactgctaccaacgcccggataagcactgaccacagctttatcgagcagacgtatccagccccaggcgccagggatatcggcgtactgacgggttcctgcctgcgtgcttacccagctcaggttcgcccccggagcctcggtatctgcaggccaggcgaagcgcttccacgccggcaactggtttacatagatcagcttctggctgtcgataatcatgtcagtctgcattaccccatcggcagtgcccggacgcaactcgaagttcatgccggcactgccttcggtgaaagcgacatccgagatatggctcagggtgttgatggcattgaggaacgccggattaaaggccagcccctgcgagttgatgctgtccggcacccagtggttgccctctttgtgcagcacgcctctgaggcgggtttgcaggaactgcgcaatacgcccggaatctgcattgaggtatttagccagcagcggcagggatacatcactgctggaattgttaaacggatagcgtccaccgaaggcactgttccactcagcaaccacggcctgctgccactgggcattgagactttcggccgccggggtcagtacctgctgccaggcctgctccatcggctgaacaaacacggtacggccaaagccgctccactccaggccgagaccggcggcaatcaggctgccgtagtcacgggtttcggtgaggtcgaccgacttaccctgaaatacggtctgcgccagcgtctgtgtcatcgcctgcgggtcggcggcattggtcacctgctgcaggcgcagacgcacctgcgtcacgcgggtcaggaacgactgcagactcaactcctgtgcacctgtccggtttttgtccatcagcgccagtaccggaccaaaggttgcatccagcgggccgtgaacaccagcgctctgatcaatggcatcctggttatcaccgccgagcagattcttcgccgatttcaccagcgaatccgaaatggcttcgcctgtctgcccggtgcgtccctgcacattcagggtgttcatcagcgccaccagtggtgactgacgcacgtcggccatcagggtcaactggtcaatggaatccgacagcgtggtcgcctggttccagcgcaggctgttgaggaactcaagccatgccccgctgaagtcggcaaagtaacgttccgtcaggcgatgtttcagagcttccggtgaggtctcgtcctgtttattcatctgacgcttgctgtcagtcagcacccagtctagtccgtcccggcgtgccttcaccaccttctcgatagcgggctgcacggcctgctcccaggcctgacgcgtaaacatcccgggcacgacttccgtggtgctgaacagacgggatgcatcggtatcgccggtcatgtcttccaggcgcatatcgacatagaggtgcgacacctgagtgagcatcttctggtacagggtcgattcgctgttgcgtacgcccatcagacgaaccagcagggaacgcgcctggctgaccagattttcatcagcacgcagtttccattcagggtgcgcaaccagctgcacgccataaaacgacagcagagaaggcgccatccccagccagacgccgttttttacaccgtcacgcatcggccagtcattcagcaatgcagagccgaaccaggccgcgtccatatgttccggacgcgccagcatcaggtagagtttgagctggtcataagtgttttttgccatctgctcacgcagcgggctgcccgctggcaatacattaaaggcattaagttgtctctgcagatggtcagcggcggcatcccgcagcagcggcaatgcgctgtcctggtaacgtggccagagtgcgtccagcaacgcattgttctggcttagtccggcctgctcgtaccacggcacgccaaactcagagcggtactgcagacgggacagcgttttttgcagttcagacagcgcgtgcaggcgctgctccaggggctgattctgtcgggcggcaagtgccgcctggacattagcgctgtcaatctggctgcggttggtgacatacgcgatgcccatccacgcagcccagccgaccatcgtaagagcaacaacagacgccatcaccctgcgccacggaatgccgggcttgtacggacgtagtccggcagggagtgtccggacagactccggcagggcatcccagcgcttatccatgccccagtggtgcggcacggcacgttcggcaccggctgaaggctgactgaacaccacgccggccagtagaagcggacggtacggattgagtatcaccgacagcggtgcggtcacgctttccggctcacgaatgagctggtcggcaagcgtcagcaggaagttatgtttcacttcaccgcaggtctgctgcagcccctgtgaagtcaaatctggcgtcagggcggacagttgctctgccagcccttcggtactgcaaccggcaggtaacaaacagccggttgcctgcgtaatgcgcccttccggtttaccggcgcgtgggtgcagggaccagacatacagcgggagctgccagccaagcgcttccatacgtatgctgatggcgtgagacaggaaatccatggtgctgtctgaaggtaccggcagcggctgctccagccctggcgctgagagctggtcaaacgctgaagtgacccataccatgccatccaccggacggcggcgcagtttgcgcagcgcggtaagccaggcactgtcggctggcgtactgaggtcaccgccccacagtaacagcgtgccgcgatcttcctgccagagctgagtcgtgagccctggggtcagttgctccacctcagatacagtgccagtgaccagcaggatgcgtgttttacggccccagcgacgaccatagaggttacgcatggctgcacggatggtatcaacggtgacattgcgtggcggtgtctgcttaacgcgaccttcatcagcaggcaggagacttttacgcttcgcctgaaaacgcgaccactgttgtttaatcgccaggctaatagttttgccatggcggacaagtagcagaagaattatcaccgccacagataccagcagtttaaggctattactggtaagtccgaacgcatcgccctttttccagatagctaatccgatcgcggcagcaatcagtgcagtaatactgatgcgtccccagttaccacgccacactgagttatccttcaccattcatcagactccctgtagttacggtattcacaaatcgctgctctttgtcacccgaaagcatcaggcaatcttcttttgtgagcgcggttatgtcactaacgacggcggcgataatccacggtgagaaaggaccgctaagtccggcatatttctccagccaatggcactgctggggtttccagctgccttcatattgttttgcactggccaaaatagtggataaatcctccccccactccatgctgtcgcccacaattgcgcgcgcagcgatcgcttgtgattgggtcgagaaaaagatatcgagctcttcactcagcatttgggttgattcaagcgacataggccgaagcaggcgagcgtgatggtttagctgatacttcgttgctacatcatcagaagtcagcattaaagccgagagggaatcactatattcattccctccctgagtctggtgaaccaacaaaagctcaacatccagaatcggggctttaaggcgttcgcccacccaatcgaaggcccggcctttaagaatcgtcagtaacggtacgggataggccattccaactaactggagccagcatgctgaaaattctctctgcaatgtctcatcaggatcgtgtgaatcagtcagtaaggttgcgtggaaagggaggtctgataagcgctgtaattctgatatgttcagtcccccaatcaatgctgaaaaagcatcttcgccagcaggtaacgttattccccgagaaagagagctactctgctcgagatctttgggggattgcagaaatgttgatggtgtcaattcatcaggcaggattacccggctatacagaaccgccagataacgaccggcccatgaagtccattgctgctgtgcatagtctgcctcatcggattcaaactgatgaagatccattgcgtggttatacatccagccgcgaatacaaatcgttacgaaccagataaaaagagggcctccggcaacaatccagaggttaaatttttgcaattcacccagaaactgattggcgtgaagtacaaagagcaacactccggcaataacagcaacaaggcctgcaatcagccagatgaccagtgaaggctcatcaggttctgcagcaattgtggctttctgacgctcccagctcataacttatcctactgaacaatccgacgcactggagataacatggcagccacattcacattcgcagccatccacaacaacaggcttcccatcagagatccattctggtgatccttttataatggcattgacaccatgcccttcaacagggcaattaatctcatcgccaacaagagctactttctttccgttcacaatcatggtcgaagatgcagatataacctcaccgccgtgagtagttttatccccaagcaatacaaatcctttggacatagcacacctaacaaattagtttacacgttttaattgaggcgacggaactgaatccatccgtttttaatttgaggaacaatatcatcatcgagaaatgcagaacaaataccgagttcaccgactgcgaaaatcgttgtagggtaacctatttctattccctttcgcccttcagggtcaggctcagaataatagggaaggccattctctctataagcgttaacatccaagtattgattgcagtttacgttaaatccattatcatcaattaatgacaacgggaccaactcatccttttcaaactttaactttttcccagaaattctctcaccaacaaatatattttctgtggtatcctctgtgaccattcgaatagtgcttgaagaaataaccatattcccctcagcaaatctagcgccagcccatccaaccgtattcaaatcagactcaacacttttctgataaaaatacacagtcggaacaccacctttaacttcaacatatatttcattatcatcagtaaacttaggaacaggacttaagatatatttacccatatttttcctgggtttgttagctaaaacgccatactctttcatagcaccatgttctttataaacccaatatccataatacagtccatcttttaccttaatagtattgcagaatgcaaaaaaaggaacaacgacaataaaaaacaatatttttttcattgtacaatctccacatggaatgctggctcaccgcgattttcaaacgggctgatatatttcattttacttgggttatcttttgcatattttgtaatagccttatcaaaagcccgctgcaaagcggcaggcaataactttttacttatatcaaatacatttctctgagcatacgattcaagagaaacgcagtgttttgaaacaagacgcccatctttttgtaaagaattgactttatcaaccatggcttttttaacctgattctccttacttttatctatgccacccacagcgatagctgcttgtacaacctcccgtcccgcagcagcataataatcaagctgggattgtatccccttgtttttcatgttcatatacattgcatcgacttgtttttccgcggtgcgcaacgtactggtgatcataatcttatggacacctgcggatttcattatccctttcataatatcaagagaatgattagttaccagatttttcaagctgagaggaatatctttagaaaaatccaccaccggctcaaaatttttatcaacagaaacatttttagctttcccctcggaagtagtctgatgcttctctggttcatttttacttctaccagcaacagactgatccgtcgtcgtagttttaatatgaattacattgctttccttttccgagtctgcggacttgcttccttttggcaaaacaatatggcttctcgaatactctatggctgctttaacattagcattttcaaccccaacgcttttgagaatctctttcttggtctgctcagaaacatagcggctaacatatccatggtttttattactatcaggtatttttaatttcgcaccaatgcgcaacatatttacgttatggatcttattaatccttgccaatttctctactgatacactatatttcttcgctattgctgataaggtgtcacctttcttaacgatataagttagagtcttatgcttttcattggtatttttttcaacagttgctttagctaattctttgtaattatcagcaagaatagtaaacacaacttctgaacctgcgatagcattgactgattcagtcatcccgttttcatcagtcacacctttgataagaactagagttttctcataatctgacactaaatttgggcatgttgaacttggaaatggagagattgcagcaatataatttttgtttttgaatgctgtattatttcccgtagacagtttaaatttagtattaacttcagtattttttagtaacccttccacaactgataaatgcttagttatataaagcgcccacttctcgccatctgcgcttttctcacgcgtaccatcgagatattttcctaaactataggcaccatcatgatgcaacaaataaagccattcccagtattcactttgatctgatgtgtaactctccatcaccttcgatttgttaagtaaaaaggaataaataaccgcatagcatcctttttcagcgtcaaaaacttccgcattacgaagatctagctgaaaaccaagaatgtcttcagattgtgtcaatgcatctttgataaaaccaaccgttccttgtgctaaaccagcagcactagtagtccccgctgccgcatcggggttaaatccagactcaaccttagtggttaataatatataagatatctctttataacttaatccatagcggacagctatggtaattatcatatctataatagcatcctggacatctttatcagcatctcctattgtacgactgttacctcttagctttcgggatgtatctatatccggatagagtgagattaaagaaaatggtttaatctggtcatcaaaatatgtctttccctttttggcattcaaatactcatataaatcagacataccattcctcagcgattgctaataaagtctatgcgtgtattgtcgtaggggtttttcatttctcgagatctaagctcagaaagtttgttgcctgtgataaagttccctgaaagatcaataaatggggcgtcaatataggacaacaatgaaccctttacgctctcctcttcatccagcccgagatggtatccgatcacaatattttcattgtcatagcatttcattgtggagggtgtccaatcaccaggtttaactacattattgaaggaataaccctgtttttccaggagagctttttggctgttcgggatgtatggcaaagaaaactctttattattcgtgccgttctttattcccaagtggtaatttttgcatatattctccgttgggcttttttcattcacttggcattcagcactgacctttaccaaagctgagccacattgcatttgtgctgatttagcattccatgtgccacttgcaaaagaaaaaaatggagtaagcaacatgcataacaaaaatttaaacttaaaagtaatatcacgcacttttatttccctcacaatcactgcattggcaaccatcgtcctggaatgacatatctgaaaatgatgaacaatgtactctttccacaatattttcactatcgtaccaataatcactttgaatcatttcaacttcaaaaggctcattcgggtttgatgagtaaactggaactgtttcaccgttctcgtctgttctaccaaataatttctgcccattactcgatgtcaacatgtatgccgcagcggcaactggaactcctgcatcagacgatgccgtaaatttcccactatatccagatggaaactggggcataacactactcatgcttacactacccattttctgcgcattggcacatttccacaggatattaccttcacagcccagaataatattcttaccctgcaactggatgaacgacccatccaaatttttaagcgcaacatctttcgccgccgtgatctcaacccgcccttctgtactggttacggtcacatcctttttggctatcgcatcaagcgcatcatcctgagcctgaatttctacttttcccttagcagcaaaaagtttcattccggcctttcgggccagcatactcacggcttcacctgctgctacggtaaatcgtttaagtgcgctaatgtctgtattctgttgcgacatgatcccaacgctggcactacctgacgccatgcgaaccgcctgtgggctggtgatgctcacgccttcaggtgcattcaacaccattcctggctgcaccagatctttgagggcatcagtcaacttcacctgactctgaatatcagcgggtagcgcctgcgcggtttcagctgcgtctgacatgctgcgggcaatactcagtgcattctcaagctgggctatcgcctcctgcatggaaagcatcttgtccccggcaaacggttgtttatctgcagtgataaacacaccagcaccaccgcgaatggaaacatgccggtcggtgcgcagttctgccccttcaccacgaagctccctggaagcgtctacattgtgacctaaattgagctgcgtcttgcccccgaactctgtactgagcttgatgtgctcttcgccgcgcttgtcctccatccgcagcttgttcaggccagcggtacggatgacattgcgcgtgctgttggcttcagtgacgtgatcgacgtgacgggagtcatgcagggcgtgagctatatacgggcgatccggatcgccttcgtggaatgcaatagcaacttccgtgccctgtatcagcgggaagtggaagccgtatttgtctccgccgtaaggtttggcaaaacgcaccggcatactttccatgccctgacgcttgtcatcgcggtcagcatcaaatttcacccgatacatgcccgaggcatcctgccaggcgtagatatcgttatctttggcgctggtcactcgtgccgtcagggtgccgctgaccaccgggcgctttttagccgcagggcgccagcaacggttttcgtagtagggtatcgctacccatgccacttttagggcattcttacggctggcgtagtagccagtgcggataataacaacaccgttctccgtttcacggggcagtgttggcgggatagccatttcggtaatagtcagtacctgcgccggtccaagggtgtggtcggtgctgctgccggtcaccgtggtctgggtggacaggaagcgttcatgctccagacgcgcccagaagttaccggtttctgccggcggtgtaattttgtcgccacgttcaaggtgacgcgggcgataatggtacacatcaccgtaggtgttcccctcgccgtcgccgcgggtcatgtcagccggtacggacatcaggacgctctgggcttcgcggtggttgtagtcactggcggtgaccgaacgctccaccacgttatgccagacttgtacgccccacaccgagtcggccgcattgtcattctcccctgacgggctgttcagcggcagtttcttaccaaacgtccaggcactctgcttgtccgcgaagtgcaccacttcggtctgagtgtcaggctgcagggtgaagaagtaaaaaatccccacctctgccagcaggcgttcaataaactcaaggtcactttcctggtactggtttatctgttcccgttttgggtaggtttgtttaagcttgaattcatattcccaccctttcaaaccatgctcgccaagaatttgcgctaccacttccggcactgatttgttgacgaagaaacggtgagtacgaaactgcttatccagtaaggatataaagggttccagaataatttcatacgtaacctgatcgcgtgaaccgatcaggcgtcggaaatttgtcaccacgccatgaacaattttaccgacagtagaattaaatagttctcccacccctatgctcagcgtagcggttttacttaacatcatttcagccgtaagctccggatgtgaactggtaaaacgaatggtgtaatgatatagagcactcatttgttctaaaccatcaaaacgttccacatccaatggataagggcaggaaggaatatctagtttatagcgattaaggaccccccctgtcattttaaatatattttccatttctataactcctgtcccaggtcagaatgatattaaataaaaacaaacccaacagatatgatgaatatcatctataacgatcccactcatcataaatatatttcagggcaaatttataaaggccataacctatgagaaaggcgactatacctgcccctcctagaataaagcggtaaggattgtcagaaaagaagaaacagtagaaagagtaaaccatactgatagttcctagcgtcatcccaatgctggctacgatccgtgaaacaatgataagtataaaatcttttatattcataaacctccaaagaagtatttgcagacattattaaactcctcaggatttatccttgcaatttcacaagctgtctcataaggcctaacaatatcctcaacaagataataaaaaagatcaaagtcacccatactgtttaatttctcatacattatggggtttctttcacgcaagtaccgtgatgtgtaaatagatcttgatgcttcagcaccaattcccaaaacaccaccagcagcagaaccagaaaaaaaagcaccaaccccctgagatataatcacccttccgaggttaacacccgtaagctgggagaacattactttacctataacacttccagatatattttttgaaaaatgtgcgactttacccatatctacataagaaacaaaatcatctataaatggcttaataattttataaatagtttcatcgttaaaggttacttttttaaccagtgcagctaaccgaaatttatcatcctgattctctctgcggtattcagtgtctataaaatcatagccaagataggcaaggctgacgggtaaggaaataacgccttttgccacggcaccgataaacccggacccatcgatatgaatagcctcaagcatatctctggcaatatcttttgcactgtccataattgttaccctttagataagcctgttaataaaactccagccctatgccctcttcctcgctccaccccagagtcaggaagtgtggtttctgcttcgccgccatatgcgtcagcagttgctgactcagcaccggcagaatctgctgattgagcaggcaggcggcggtcagcgcgtcatgcaggccgtttcatcatccggttcgtccactttgaccatctggaagcggcgctccagtgcggcatctcgttcaaaatattgcttatattcgctccaggtggtggccgcgatggtgcgcagttcgccacgcgccagagccggtttcagcagattggccgcatccgccccgccggcctggttgccggcaccgataatggtgtgggcttcgtcgataaacagcggaaccggtaccagtgacttctgtacggcatcgatgacgtttttcaggcgctgctcgaactccccctttacaccagtccccgcctgaagcaggcccaggtcgagagtacgtagaactacaggcttgagggattccggtacgttgccttcggcaatacgcagcgccagcccttccaccagggcggtcttccccacgcccggctcaccgaccaggatcgggttgttcttgcggcggcgcgagagaatgtccaccatctggcggatttccgtatcgcgcccaaagaccggatcaatcttgccctctttcgctttggcggtgacatcaatggtaaatttatccagtgcgttctgcagggccggagtcagctcgccttcttttatccccgcgccgacctgactgccgacaaattccacttcaccaccgtgattttgtgccagttcggcttcctgctgcacttccgggcgctcatctgactgtgcatccagcaacgggcgaagacgctcaagttggccctgcccgagggtcagcagcggccacagtccatcgcagtgtgccagtttaggtttatcgaccagcgccatcagcaggtgaatgctgcggatgtgctcttcacccgccagcgaggcatgcagccaggcgtcctgcatcagggtctgaatactgtctgagagctgcggacggctgcgcaccgaacggggcagcgtgtcgagaaatgccagcaaatcctgccagatggcgtccatatcccattcgtagcgccgtgccagcaccgtcaggtccccctctcccagctccagcagcttcagcagccagtgctcaggcaggatttccgcgtgagcgcgggtctggcagagcgaagctgccacttccatcgcacgggcacagtaagggttcagacgtcgcaacaggctggctggattttccatgaatctctctctttgtcagttcctggacacgctaccgcccctcgctgttcaccaaagcgcataaggtcaggcagacagattgtatttttctttgctgagtgcccgcatatcaggctctcagcaaaaaactgtggacaggaaaccccgcccgcatcaggcgattgccctaaataattcgtgttgcaggcaggcggcaagttcgtgaatccccgggagcatagataactatgcaaccggggtgagcggatgtagccaacgcacctgcggcgcgaagtatgacgggcaattacgcggtggcgcgttcgttccagctatcggaatgaatgatgttgccgtctttgtaggtccaggtgattttttcgtaacgcagttctacgcgctcaagatggttgtgcttctctttagaaggatccttgatgtcgtacatttcagggctcactttcaccaccttcacgttttcgagtttggtgttgaagtactccacttcctggcccgcgtcgttgatcttgtaccacttgaattccgcagacttgagggtctgaccggtggtcaccgccctgtacagatacgggctggacgagtcgatttccttggtgaacaggaacggcgtgtggatacgggtgccggtcagtttgccggtgttgttatcggtcgggatgtacaggttatgctcctgagcgacaacttcgatgctgccctcgcgatcctgaacgtccacagatcctttaatgtccgcaccgccgtcgtctttcagccaaagataaacaggaattgccatggaattactctccattgtgttgtgatgcgccatcatcctgcgatgacgccgggtatttgccgggtatctgacaggcattggcctgcggtaccagactgatttcgacacggcggtngagcgtacgcccttccggagtgtcgttggttgcgacaggacggctttcgccatagccctgcactgcaaaacagctttccggcacgtcgccggtgtcgcgcatccagtcgcgcacggactccgcacgtttcagggagagcacctggttagactggtcatcccccgtgctgtcggtatggcccgccaccacaatcagccagccgggcttcgccttaatccccaccagagagttcaccagcagctttgtcgagccaggtttcagcgcccattttccggtgtcgaacagcgacatgctgtcgagacgaagggttttcggaccctgaatgattttcttaatgaccggaggcggcggtggcggaggtgcccagtcactgactgcggcctcaacgggcggaatcagtcgcagtccctgatacagacccaggcgataacgcagtggctccccgcgacgttgccagtcgtccagcaatgcgccatcggcccgcaggcgctgctgcgcacgaagtttcggggcaacaggctgccccttcagctggtgatataacgcaaggtgatcgctaacattacgaatgaggcgctggttgttcatccaggacgccagcatagccagcgcgagaaaaatcccgcccagtaatccggcataacgccagaacaccatcctgcggctcacgccacgtcggcgcggcaacgccggcagcagcagttcaggcagcggcagtggctctgtgctcacaacggcatccggtggcagcgccgtcatcgaagtgatgtgctgttgccagagattgcctgcgataccactcaccggcaccatgcacataccctgcacgcagggcgtcatcaccggtaactcccctcgccgtaccgacagcaggtcattcaccgcgctgttttgccaggcaagcagactgtccagccacaggccatggctcagacgcgaaagacgcccgtccgttccgatttcctgggtccaatccgtcagtgacacattgccctgaccggactgatacacctgaataccgcttcgcgggcttaccgtggtaaaccagacgggctcagcctccgcacagaccacaggaggagatacccaggtcacggtccacagcggggggatagtgccaaatgccgcacggcaccggacaacagcacgctgccagcccctcagggactgggtaaaatcatccccgaaggtatgctgctcaggtaccaccgccagcatgacggagatttgcgacaccagagccggacgcaccaggctcagatgctgtgccaggagtggcagctgttccgcatcctttacccacagataccagccctgccgggtttcccggtgacaggagccggacacaaacagcgggctgttgtcgccgcagacgaggatcaccgccccctgaaaatcttccggcggcaggttttcatccactatttcccggatagcggtcgcacgtgcctgcgaagcccggcgctgacgccagaacatcaccccggagaccagaacgaccagcaggctgagtgccacacggctgcccgtggacagtggccagaatcccagaatgagccacagcgccagtacggcacccaggacagttaacagacttcggtacgcatcccgcatcgcttaccccggcctgacggtctggcttaccagcccggtaagcgaagacgagaggaagaaccagagcgcggccagggcgacaacggccacaacccaggtcagccagtacccgcgacgaccgctgcgcaggcgtgatgcccgggccacaatcggggcgtcctgtgccagcgtgaaggccggcacccgttctgcaagcgcgcgaacagtatcttcccgacgctcatcatcctgggcgcgatactgacccacaaaccccagctgcagggtccggtacatacaggtcaggacggcggcgtcaggggtagtatctttcagcagatctcggatcctttcccacagctcctcaccggcattgagggtaccaaagaagtgtgcctgtagcgggtcacggtgccaggtcagatagccatcatcggttgtaccccggttcatcacgctctcatcaagcagtgcacacagggcatacaccatatggtcacggctgatgtcgctgtaaccggcttctgtgagcgcagccttcgcctcctgcaccagacggcaggcccgacgatagagcccttccccgtcacggacctcctgtccgccccgcagctggctggccatcagccagcccgggtagaaaatacgctcaatttgactcatttctgatgtattcatgtgcgcagcaccgcaaagagttcaagtttcacatcccccagtgagcgcggggtatagaaggtgcaacttcccgcttccagcatcgcccgcgccgcctcactactcagatccagcgagaaatactggttctcaagacgtaacgggatagcggccggcacatgggtcagcggcttgataaccatcccgctcagggccacattcaccacatccgaaacatcatcaaagctgcccgctttacacagctgcgggaatttcgtctgaagttcataattcggcatggaggagcgtacggaaaggtagaagtccgccccttcgcgcaggcgcgcatcgtgcagggcacctttccagatctggtcctggtgctccaggtggatactcaccacccgtgacggcaggctcgcttccagcagcttatcgagcagtgccagcagcggcggaaatacccgttccggtgcatcgtgctggtaagcaggaagatcgccggcgtcgtgttccagagagaaggtgagcaggctgccggccagacgggacaattcgcggtacaacagttccggatgacgatccggtgtctgcagcagttccgtcagcaccggctcggcgctgttcagggcattaagcagccagaacagggagacatccgcgaccgcaaagtctgccatccgctcattgctctcacgacgcatggccatcaggcgacggcggcgggcctgcagacggaccagcaggtcacccagttcggtggcaagccacggactggcagcaacagacagcattggcgggataaaggacgggtcccggctccactgcccctgcgcattacgcaccagacgagcgaccggacaggtcaggtatgccgtgttttcctggctggacagacgcagggtcagcgcatgacgcaagatcgcgagttccccgctttcatggccggccagttcctgcaccaccacacgctcagctttccagcgacgcgggcgctcgctgtcttgtccgttatcaaggttgccaccactggcgctcagcagcggcaatgcggcaaccacctcaacagcctcagagccgtttgcggcatacaaatcacagaccggcggaatattatccgccagatccgtatcaaccatcgtgccatcctggaaacgtacgaccagacggatggcattcaggcgcgcgagcgccagtgcagcatcatcaaattctgccgcaaccacgcccaggggatgagaaaaccccatccgggcgaccatgtcggcaacgtattcactccagcgggcctgctgctggaattgttgcggggccagagcggccccatcctcccaaagtgggcggtaaattttcatccctgatttcccctcgccttacgatttggctttcggcatctgggaaaccagtgacaggttgacgtccatgccttccacctggaagtgcgggatagcgtacagcttcacgcggaagaagcccggattgtcttcgatgtcttccaccaccacttttgcgtcgcgcagtgggtgtgaggcctgcagctcgtcgcccggatcggtcatttcggtcaccagactgcgcacccaggtgttgagttccagctccagcaggcggcggtccttggtggaaccgatgttctcgcgctgaatcagcttcagatagtgggcgatgcgcgacagcaggaagatatacggcagacgggcgttaatgcggctgttggccgtcgcatcggcggtgtcgtacagcgccggtttctgggtggagttcgccgagaagaagcacgcatagtcgcggttcttgtagtacgacaggggaatgaagccgaggctggcaaattcaaattcgcgggtttccgggatcatcacttctgacggaatcttcacctgtttgccggtgccgaggtcatacagatggattggcaggtcctggacggcaccaccggcctgcgggccacggatttgcacgcaccagccgttgttgatgaagctcttcaccatgttggccgcaaaggcgaacgaggcgttggtccacaggtatttatcgtgatccgggcctttcacttcttcaacgtagttgaaactgcgcaccggtacggtatccgggccatacggcaggcgtcccagcacgcgcggcatcaccagaccgagatagcgggaatcgtccgtctcgcggaaggatttccatttgatgtactcggcgcggtcgaagtaattaccgatgtccttgatagcggcaacctgctccatgttctcttttaaaaagaacgccgggcctgcagagccaatgaacggcatgtgggctgccgcagacacttttgaaatattgcgcatcagcgccacgtcctgcgcggacgcatcaaactcgtacgctgaaatcaccgcagcaatcggctcgccacccggcgtgtcgtattccatcgtgtatgtctggcggtacaggccactctggataatttccggcgagtcctcgaaatcctgacgcagttcatctttggacaggtcaagaatctcgatttttacgttctgacgaaaatcagtcttatcaaccagcgatttcaggccgcgccagacggattctgtcttctggaattcatcgctgtgcatcactttatcaagctggcggctaatctggaaatccagttctgcgatgtggtgatccagtaatgttttatcgagtttctcaactttctggccagacttctgtaggcactgcatgaagacctgaacggcggcagtaacgcgcgcatcagcagatgtttccgccatcacggtattatcttcaaaaccattcaggtcaccaatttcagcaaccggtgttaaattaattttattgaacagggaagcataaacaccattctgtggcagcgtcttttcaattgtcgcaccgcctgtataattctgggattcattattgactgacataagcattttactcgtgattattccgttaacgggttccggtaattatccctgtaccggggcaagcgcattcagttcgcggcgaagttcatcagtaagtgccgggtcctttaaaatagtttccagttctttcctgaaagtgacattatccagaagattggatttcaaatcacgcagtaaattacgcatagcgagcatcgcacggagctgaggtatttgacgtgccaccgcctctggctcaaaatccttcatattctgaaaaagcagcttcacgttttcttcggagccatcgtttgccagggtatttttaacggtgatatttacttcgggatggagatcagcgagaacgctgttgaagttatttttattgatgttgattttttcgcgctctgaaagggtcccctccgccctgccattgctgtaatcgccgacagtcagcagcttcagcggcagttcaactttcttcctggcaccgcccgtgaccagatccagttttatatttacgcgcgcgcggggtatctcgttctgaaatgattcagacatggttatttatctcctgaataaattaatcccttgttggattgagtatcaccatataaatacaggggcttttattttaaccagtgatttgcgttaaggtaaagcggataatatagggaatttaacttcagtgaaatgtactaacatttaattcaggcttaactaccgcaccctgactggctttgagtgctaaagagccaggctgtccgcttaatttaaaatgaaaaccccgaccaattaagcatttcacgggaatgttacaggatagtgcttaatactgaaaagccctaaaactgtccaatactggacatatcattaaaattcgggataaccagagataccatttattcttttcggcgcatcggatataagataatcatccactggatgcatggaagatgtagtacctacaaaaccccgttcacttcgtttgacgaggtcactctgtatgacgacagaaaaattatctcctggctggaatgtggcaagcttctgcagtttttgcccagccatatcgggtttgtgcctggacgaagtgcataagtcattcggcgaatgaatgacaacacggcgttttttctctccagataaggagataatctgtttgacggcgggtactgggcgatagccttcatccagcatatataccggacatttgtctttgcgttaagttgttcacggcgcagtacattacgctcagcccgaccctgcttgtcggatttactaacctcttcacccgccggtttcacaaccttcgacgcgcttgttgttctccttgttttgacgccaggtaatgtaatatccatcattattcaccgattaaatcggtaaccccttaagaacccgcactctcacagagtttgcgggttttttaatgtcatatttccaccctgttctaagcgaaacgctaccgcgactctgattgtaaatcccggaaaaacttctattatttgactgtacacgtcatttttctgaaggatttacatgagagttaatggacttacgaaaggatttttcatcctgatcgtgctgatcgtcacccttgcttttttcgacgttctctccccctattattcagccattttatgggcggccattctggcggtgatcttccacccggtgaagaacaagctgcgcgatcggctcggcgagcgtaacggcctggcggcgtttctgacgatagtgattatctgtctgatcgtgtttaccccgctggcgatcattctctcgtcgctggccttcgagctcaacgtggtttacaccaaactgcagcataacgatacccagttcccgaccgtggtagccagcctgtttgctcacctgccggaatgggcaaggagcttcctctcagagcataatcttgatagcgcggaacagattcagcggcagctttcggacgttgcgcttaaaggaggccagtacctggccggtagcgcattcctgattggtaaaggcacgttcggttttaccatcagcttcggcatcatgctttatctgctgtttttcctgctaaaagatggtccttacctggtcaggctgattctggaatccctgccgctatcaaatcacgtgaagcagcatcttttcgccaaatttgccgccgtcgccagggcgacggtcaaaggcaccgtggcggtcgcgctcgcccagggcgcgcttgggggactggcgttctggatcgtgggcattgatggcagcatcctgtggggcgcgctgatggcgtttctgtcgctgatcccggcggtgggctcggcgattatctgggttcctgcggcgatctatctcttcgcgaccggtcagctctggcagggcgcgtttatcgtcggtttctttgtgatcatcgtaggcctggttgataatattctgcgacctttactggtgggtaaagataccaaaatgccggactacctgatcctgatcaccacgatcggcggaatggaaatctacggcatcaacggctttgttatcggcccgctgatcgccgccctgtttatcgcctgctggaacctgctgtccggacgcgatcacgccggaaacatcgatgagcttgatgaggatttcttagaagagggtaaaaatcacgaggagtagcgggcggtattgcacaacatcgcggggacagcgaggtcagggggaatgccccttgctcaaccgcgatgaaatcccctccccccgcgcccataagcagcatttataactggtatttgtgaaaattttggtaaacgccactgcctatcaacgtaacaaatgctaacattatgctgtttatgattgataacaaaggattacccacgtgaaaaaaatcactacgtttgctgcctccctgctggccgttgcctgcatgtccaccagcgccgctgcagctgagcagccgctggagaagatcgccccgtttccaaaggcggaacaagggatgaagcgtcaggtgattcagctgccgcagcagcaggatgaatccgcattaaaagtcgagctgatgattggccagacgctggaagtcgactgcaatcgccaccgccttggcggccagctggaaagcaaaaccctggaaggctggggctacgactactacgtatttgataaagtgacgtcgcccgtctcaaccatgatggcctgcccggatggtaaaaaagagaagcagtttgtgatggcaggcctgggcgatgcgggcatgctgcgctataacagcaagctgcccatcgtggtttataccccggcgaatatcgacgtgaaatatcgtatctggagagcggacgaaaccatcggcgtagcggttgagcgttaatgcctgaagagtgaatccggcggcctgcgccgccggagaagcgcttacagcgcgatgtcagcgataggtttcccttccggcagcggcttcagcgtcgcctgcggaacgttatcagcctcggtaagcggctcatagcgcagttccagcacttcgctggtccacgccagcgccttttcaatttccgctgcgttgccatccagacgcgtaccgtagctcgggataatcgctttcagtttcgcctgccactccgctgagttgatcttctctttgaacactttctccatcagctgcagcatgattggcgccgcggtggaagcacccggcgaggcgcccaacagcgcggctaccgtgccttcatcatcgctgacgacttcggttcccaggcgcagaacgccgcccttcttcgcgtcgcgcttgataatctgcacgcgctggccggcctgccataagcgccagtcttctttgcgcgcttccggatagtactcgcacagcgccgcgtgacgatctttgtccttttgcagcacctggctaatcaggtattttaccagatcgaagttatccagcccgacgttgagcatcggcatgatattcgacgtgttggtggaggccagcagatcccaaagcgaaccgtttttcaggaagcgggttgagaaggtcgcgaacggcccaaacagcaccacgcgtttgccgtcgataatacgggtgtcgatgtgcggaaccgacatcggcggcgcgcccacttccgcctgaccgtagactttagccagatggtgagtcaccacttccgggttctcacaaaccaggaactgaccgccgaccggaaagcccgcgtactccttcgcctgcggaataccggtttcctgcagcagggtcagcgcggcgccgccggcgccaataaagataaatttagccctgataacccgtttctggtggcgattgttcgcatccgccagcgttacgctccagctcttgtcggcgttgcgcttaaagcgacggaccacggtacccagctgaagcgagaaattatcatgggattgcagtccggcgatcagctgacgggtaatttcaccgtagttcacgtcggtgccgacttccgagcgggtcgcggccaccttctgctgcggatcgcgcccttccatcaccagcggagcccactctttaatttgttgatgatcttcagagtagcggatgccgcggaacagctcgctttgttgtaacgccgcatagcgggcgcgcaggaagttcacgttgtcttcgccccacacgaagctcatgtgcggcacgctgttaataaaggatttaggctttttcagaatgccccgggtcacctggtgggcccaaaactgacgagaaatctggaaagattcgttgatatcaaccgctttatcgatattgataccgttagcggtttgcggcgtatagttcaattccatcagcgccgcgtggccggtgcccgcgttgttccatccgttcgagctctcttccgcgacgctggacatctgctcgaccatggtaatagaccagtccggctccagttcctgcagccaggttcccaacgtggcgctcatgatgccgccgccaatcaacaatacatccgtctcttgctcatggcgggtgttggtccgagtgttattggaaccaaccgcctgtgagctgggtacggccatctttttcttcatcggatttgagccttactttactcgcttttttatttagcgcaggtgaaacgattctcggcttcaaaggtaacactgaagaaaaaaatttaaatattgtttaaattttaagttgagttttgagatctgttataaaaatgtttaataaatgtgtatcacaaatcacattttgtactggtgtcagcgatgtatccgcgctattatcctcggttttgtgaccgaccgcacgtaagcagcgaccgatcccggccaaaattttttaaattctgcgaactttttttatgcccccagtttccgattccgctacctctggtcacgctggcgcattaggccagatactgcgctcgcccgcgctgctgacgcgtgaaacgctggcaggcgtgctcaccgcgctggccctgatccccgaagtcatctccttctccgtcatcgctggcgttgacccgaaagttagcctgattgcctccgtggtactgtgcctggcgatgtcggtcctcggcggccggccggcgatggtcaccgcggccgccggctcggtggcgctggttatcgggcccatggtgcaccaatacggcgtcggctacattctgccggcggtcgtgctggcaggcgttattcaaattttgtttggcctatgcggcatggcgcgcctgatgcgctttatcccgcagccggtgatgaccggttttgttaacgcgctgggtattctcatcttttttgctcaggtaccgcatttctggagcaagcagccgctgattatcggcctgttcgtattgacgctgctgattgtcctgtgggcgccgcgctttattaaagcgatcccttctccgctgattgctatcgttctgctgacgctgtttaccgttttcagcggccagctgctgccgaccgtcggcgacgaaggctccatgagcggcggactgccggggttaaccagcctgatggtgcccctcgacttaaccacgctgcgcatcatctggccctgcgcgctgagcatcgcttttgtcggcctgatggagtcgcttctgacggcgaagctggtagacgatttgacccacaccccttccagtaaggcgcgcgagagcgccggtctgggcgtcgccaacattctcgccgggttttacggcggcatcgccgggtgtgcgatgatcggtcagaccatcgttaacgttgaaatgggcaaagcgcgcagccgtgtctcgaccgttgccgcaggcctggtactgctattgctggtaaccgcgttaagcgaagtgatggcgagaatcccgatggccgtgctcgccggcgtgatggtgatagtggcggtaaaaacctttagctggcacagcattcgtccggcggagctggcgcgcaatccgtggccggaaacgctggtgatgctggtgaccgtcggcgcgaccgtcggtaccagcaatctggcaatcggcgttctggcaggcctgctctcaatggccctgatccctcgccgtctgcgcactcaagcgcaggctacatcagaaaaagcgtcgccagcccaagaaaaataaagaatcccccggtgtcggtaatagcggtaatcatcacgctggagccgaccgccgggtcgcgtcccagcttgaccatcaccatcgggataatcacccccatcatcgccgccatcaacaggttgagcatcatcgccagcgtcattacgccgcccagctgcggatcgtcgtacagccaccaggtgatcgcccccataatcccgccccagacgatcccattgatcagcgcgacgcccatctcacgcaggatcaggaacgaaaagcttcccggctgaatatgctgtaacgccatcgcccgcacgatcatggtgatcgtctggttaccggtgttaccgccgattccggcgacaatcggcatcagcgaggccagcgccaccagttgcgaaatggtgtgctcgaaaccatcgataacgcgggaggcgataaaggcggtgcacagattgaccgccagccaggcccagcgggtcttcaccgctttgctcaccggggcaaacacatcgtcatcgttgctcaggccgcccatccggcgtagatcgttatccgtctcctcgtagaccacgtcaacgatctcatcgatggttaagcgccccatcagcttgccgtcggcatcaatcaccgccgcgctgagtaagtcatcacgttcaaaggtacgcgcgactttttccgcgtcctcgtgcggctggaaggtcaccggatcgccttccatcacttcccccacccgcttctgcgcatcgttaagcagaatggtttgcagctcgagttcgccgagcagcagcttattgcgggtggtcacaaacagtttgtcggtgttctccggcattttccctagtcgccgcagatagcgctgtaccgccgcgagagtggcttccggacgaacggtaatgacttcaaactccatgatcgcgccgacggtattgtcggcgtagcgcatcatctggcgaatacgcgcgcgcttatccgcgggcagcgtggccagcaaacgtccggtcagatcgcgcggcaggtgctgcagcaggtagacctgttcatcaatatcgagattttgcagcgcgaacagcaggtcgtgatcgctcatctcctcgatgaggtcgccccagacgctttccgatgcctccagcagcacttcaccgcgcttatcatcagcgaccagccgccagagcgcgttgcgcgcatcgtaaggcagcgcttcgagcgcatcggcaaggtccggaggcggcaggtgggaaaccagcatctccacttccgccagatcgtcggcaagcgtgctgtcatcgtaacgttcagcgagggttaatttacccagcagcgaggatgtgacggctttatcggtgctcaggagccaaatgaggcgggcgcgctcttcgtcacgcaatctggcgctttttttatgcaaaacggacatcggtcaggcaatccttgtaaaaatatctgtcagaccagcaggccggaagccttaagcatagcgcgaggaggcggaaataataaccgctatgaattcagtcgacggaaaaaacagcagcctgcgggaagcccggaggtcggctggcgcctccgggacggcgtaaagcgatcaggcggtacgggcgaccgcgtcgcgggtcgccagctcgcgctcatttccggtcagctcagaaagctgaccgccgcgcatttccagcagcctgtcggcgtgctgaaagtagtgatcgtcatggcttatagcaaagagggttttacccatctccttcatcagcggcagcagcacctgatagaactcacggcggaaatgggggtcctgatccgccgcccattcatccagcatgatgatatctctatcttccgctaacgccagcagcagcgccacgcgctttttctgcccttttgacagcttcaggtcgaggattttgccatcgtcgagccgtagcttatggttcatctgcagataacccagccacttctccaccagcgtcgggtcagccgccttcccttccggccccagcagtctgtcaaacagccagacgtcggtaaacaccgccgagaacagcttgcggtaatcttccggcttatccgccgccatcggctgcccgtcaaccaggatctgcccggaaaggggctgatacaaaccggtcaacagcatagccagcgtcgatttcccgctaccgttaccgccgatgagaaagaccagttcgccgcgcttgagggtcatgttgatcggcccgaccgcaaagctgttgtcaggataatggaaggtgatgtcgcgcagctcgagcgtctgccagtggggatgcgcctgcggctgcgggaactcagcgcggtacggcgcgagcgaaaacttattcagcttgttgaatgccacctgcgcgctgagcagagtgggcagcgcgcctaccgccgagagcagcggcgtgcgcaggaataatagggtcaacgagtaggtcgccgccaccgccgtatcggcccagcccaggctgttggccatccagaagaccaggccaatcgcgcccagcatcataatattcgaccagttgaccgcgctcagatgaaaggtatcggcgcgaacaatatggtgccggtattcgcgcgcgtccggcagatagagctgagtaaacacatattcggcgcgctcgcggttgagagtgagctctttgcgaccttcgagcaccgtctggtagtcgtgatacagcttatcttcgctttcgcgcagcgacgccatatgcttataaacccgcgataccagcataaatccgccccagatggtcaacgccagccacagggcggtaaccagcatcatttttcctgacagccaggccagataagcggcggagccaaaggtcagaataatcccctgtaccagctccggcaggcgcacgaaggcaatggtgatattgcggatatcgctggttagcccggccagcagcgacgcgctgccgattttctcgatcttctcgatttgcgtatcaaggatgcgctttataaattcgccgcgcaggcggtaaacgaaatggtggccgagcgtggtcagcgccagctgcgagccgagggtgaccgccatcaacagcaataacagcccgagaaactccggcaggaccgtcagggaggtatcgacaagggttatcaggcgcaggttaatgaaggcgataagcccaatacccagcgccgcgctcagcaggctcagggcaatgacggagataaacggccagcgatactggcgccagacaagaagaagaagttccataacgcgtaatccgggcaagcaaaaacagccagcagtttaaactgctcgacgatgacagcaagaataattcttatttttattctttattacccgccaggcggaaagtgagattgtaacgacagccgccggtagccggatggatgccctctttcagcggttgaataccgtggtaaaacagccgcgattcgccgccccagaccaccacgtcgccgtgctccagcagcacccgccgcagcggatcgttacgccgcaggccgccaaactgaaatatcgccggaagccccagagagacggaaacaatcggcgctcgcaggttttgctcgtctttatcctgatgcagcgacagcttcgttcccggctgatagcggttgataagacacgcatccggggtaaagcgcgcatagccgctcgccgccgccgcttctgcggccagttcgcggaaaagcgacggcatctgcggccagcgcttgcccgtcagcggatcgtcggcagcataaagatagccgtgctggttggtggtccagcccagctcgccgcagttggtcatcgccaccgacatggtatagccgccgggggtgaccatctggcgaaaaggcgaacggcaggcaatctcgctgattgcctgcaaaagcgccggcgcgcgctctcgggcgtagcggcgcaaaattatcgcccccggagccagcggctcctgccagggcggcgtatcggcaaaaagatcgagcattatttctcctcggatgacgcttctcgcgccagcagcagcgccttgcgcgccgtaccccaacgatagccggatagcgccccatcctcgcgaacgacccgatgacagggaataaccagcgccagtttattcgcagcgcaggcgcttgccaccgccctcaccgcgcgggggcggccaatactttgcgcgacctggcgatagctgcgggtctcccccgccgggatctgacgcagcgcctgccagacctgaagctgaaacgccgtgccgcgcagatccaacggcagggaaaacggctgccggtggtcatcaagatgggaaaatacctgcgccacccgctgacgaaaaatctcgtcgcccggatgcagccgcgcattggggaacaggctggctaattccgcatagagcaaggcgtcgtcctctccgggcagcacggcgcacacgccccgctcactctcagccaccagacagcgccccagcggaccgtcaccgcatacccaggtaatatcaatatcccccccgccgcggcgaaactggcggccggtcattcccagcgcggcgtcagcctgctggtagtagctgctactatccggaaaaccggcagagagcgccgcatcggtaattttctccccctgccccagcgcttcgcgtaaacggcgagctcgccacgcctgttgccaggctttaggggtcattccggtgacggatttaaagaggcggtgaaaatgaaaggggctgaccgcaagctggcgtgccagcgcttccagcgttaacggcgtctcctgctccagcagacggcacgcggcagccactttctctaccttctgctgctgcggatcggttttttccggctggcagcgtttgcacggacgaaagccttccgcctgcgcggttgccacatcaggataaaagcgaacattttcccgcagcgcgcggcgcgagcggcaggaggggcggcagcagacgccggtggtcagcacggcaaagacaaactgaccatcagcgctggcatcgcgttcgcataccgcctgccagcggcgctcatcggtatcaatcattatcgttttcatcacggactcctgctgtaagtgtatcttcagtgtgggccgaagtccgtcatcaaaaacccgaaatcttgcgctttaatttttctcgccaacgaggaaagtgcggaactgcggcgacatccaggttttaaacccgtccccctctttgataatcatatagaccgccagcccctgttcgcgtactacgtcacgcgcattttccggccccagcaccatcagcccggtatcccagccgtcggcctccagcgccgttggggcgataacggtcaccgaaaccagtttatgatcgataggccgcccggtttgcggatcgataacgtgcgagatgcgcttaccgtccagctcatagtagttgcgatagctgccggaggtgctgatgccgtggccgttgatatcaacgatcgcctgtaccgcgttttcgcgatcggttggcttctggatcgccacccgccacggctgcccttccgcattcattccccggctcgccagcgcgccgcccaccgagaccaggtagcgcgagatcccctcctgctccatcaggcgcgccagatgatccgcggcgtagccttcacccacggtagagagatcgacaaacagatccggaatatctttttgcagaaactgcttgccggcctggttgatcaccgtcagatgctgtaatccgctgcgcgctttcgccgcggcaatctgctgcgcatccggcgttttgaccggctgtttatccgggccaaagccccataaattgaccagcggcccgacggtgatatccatggcgccatgggtttttgcgccaatgcgcagcgacatcgtcacgatatccgccatcgcctcgctgaccggccacggcgaggtgcccggcgaatggttaaagcgcatcaacgctgaatcgttcttccaggtggaaagcagacgatcgtcggcatccagctgagcctgaactttctggcgcagcgcctcggccttcgactcatcaacgttgatgacgctaacccgccagaatgtgcccatggttttaccctccagcacggtggcggcggattttggcgtctggggagtggtggctgaatcacagcctgaaagtaatacgcaggcgccgaacagggcggcgcggaaaaaagtgatatccataaaattggcttcctctggctaaggcgcaaagagtacaccagcaaggttaaaccgggcataaaaaaaggcgccatcggcgccttttttcaaacttcagcgtgcttagaactggtaaaccaggcccagtgcaacgatgtcgtcggtagagataccggcacgacgggtaaactcgttgtcgtccagcaggttgattttgtagtcaacgtaggtggacatgtttttgttgaagtagtaggtcgcgcctacatcaacatatttcagcagatcctgatcgccgaaaccttcgatgtctttacctttggactgcaggtaagccacggacggacgcagaccgaagtcgaactggtactgagcaaccacttcgaagttctgcgctttgttagcaaaaccgctgatggagtcagaatcaccgctaccgctgaaacgagtagcattataggtctgggtgtactgagtcgccaggtagatgttgttggcgtcatatttcaggccaccggtgtaggtttcagcgttgtcaccacgacctttggacaggttattctgatcgccattacgtttggagtgagagtacgcgaaaccagcgctgataccgtcgtagatatcataggtcagagaggtgccgtaaccgtcgccgttctgtttcagagcgccacgaccgttgttggtcggggaagtaccttcgccgcttacgctgccgtttttaccctgatactgcagagcaaagttcaggccgtcaaccagaccgaagaagtcagagttacggtaggttgccacgccgttagcgcgagactgcaggaagttgtcagaaccgtaggtgtcgccgccgaattccggcagaacgtcagtccaggaagttacgtcgtagacaacgccgtagttacgaccgtagtcgaaagaacccgcgtcgccgaatttcagaccagcaaatgccagacgagtccacgcctgatcgctggagctctcggtgttgttagcctgaacgttgtattcccactggccgtaaccggtcagctggtcgttgatctgagtttcgcctttgatgcccagacgcatgtaggtctggtcgccatcggaagatttgtcgtcagagaaatagtgcagaccgtcgattttaccgtacagatctaatttgttgccatctttgttatagacttcagccgcattcgctgcgcctgctaccagcagtgccggtaccaggagggacagtactttaactttcatgttattaaccctctgtttgttatatgccttttattattgccactgcttactgattacccttctaatcagtcggctatttcattgtgctgcaaaacgaggaataatccaacaagaatatgatactaaaacttctaagatgtttcaaaatacccacaagatgtttcaatttgtaaatatgagggaactttttttcggtcctaaatgggtagtgaaataagcactaataatcaaaaaataaaaatttttaatccctgtcaatgagttacacggttacatatctatagcactgaatggtaaaacaaaattctcgtctgcgactaaaattaccctcgctatcatcattaactttatttattaccgtcattcagttctgaatgtctgtttacccctatttcaaccggatgcctcgcatccggttttttttacccttctttacacatctttaattattctatgctaccggcgaaaaaaataacggttattaatcaaacagcttgcgaataaactcaaggctgtttatataatttcttgttatttagtgctatttccgttagtcaatccgtaaataattgtacaaaatcactcgggccgtacatctttgctcgccgcgcgggtttgggataaatctcaaggcaaaaaagtcgttgtatagtattcagatgtatggattttggacgttaacctttatactgttcatagcatctgcgctgcccccggttaacttggtgcaacagtccgtttacacatactgatgagtcgtactctcacacgatgaccccgaaaaaattttccctgatacccggcaacattacccgcttctttattctcatggtcatcgtcctgctggcgacgatgggggtcatgatccaaagcgccgttaacacctggctaaaagataaaagctaccaggttgtcgatgtcagctacgacttacataaacgcattgatacctggcgctacgccacctggcaaatctatgacaacattgccgcgacctcgtccagttcagccgcagaaacagggttacaagagacgcgtttaaagcaggacgtttactaccttgagaaaccccggcgcaaaactgaagcgctgatttttggctcccatgacagctcaacgctggaaatgacgcaaaaaatctccaactatctcgatatcctgtggggcgccgagactattccctggtcgatgtattaccttaacggcctggataacagcctgattctggtttcaacgctgccgttaaaagatctctcctccagcttcaaagagtcgaccatcagcagcgtcgttgaatcacgacgggcagaaatgctgctgcaggccaacacgttagatgaacgcgagacgttttcgtcgctgcgccacctcgcctggcaaaacggctactactttacgttacgcaccacctttaaccagcccggccacctggcgaccgttgtggccttcgatctgcccattaacgatctcatccctcccagtatgtcgctggagagtttccgcctggagcccgatccgtcgcagaacgtcagcgccaatccggataaagaaaccgccgacatcgtcagcattaactttaacggcccgcagattgaaattatcaccacgattaataccaccggtatgcgcctggtctggatggtgccctttagcgagctgattctggagtccttgcagagtattttactgccgctgctgctgaacattggcctgctggcgctggcgctgttcggatttaccaccttccgtcactacagcggccgcaaaagcatcgtggggacggccgtttcctcggccgccaatagtgaattacgcgcccagcgcgccattcacgaagagatagtttctctgctgccgctggggctgctggtgcacgatcaggaagctaaccggacggtgatcagcaatccgattgccgatcatctgctgccgcatctgaatctgcaaaacatcatcaacatggccgatcagcaccagggcgtgattcaggcgacggtgaacaatgaactgtatgaaatccgtcagttccgcagccaggtgtcgccgcgcacgcaaatctttattattcgcgatcaggaccgcgaggtgctggtgaataagaaactcaagcaggcccagcgcctgtatgagaaaaaccagcagggccgtacggcgtttatgcagcatatcggcacggcgctgaaacagccggcgcaaacgctggcggaagaagctgctgtgctcggcatggccgaaagccgcaggctggcccagcatgccgatgaactggtacagctggttgatgaaatagagctggcaaacctgctggagagcgatagctggaagagcgttcaggacctgttctcaattcaggaattgatcgatgaagtggtacctgaagtcctgcccatcatcaaacgtaaaggtctgcagctgctgattaacaactcgctaccggccaatgagcagcgctacggcgatcgcgacgccctgcgccgcacccttttactgctgattcagtactcggtgaccaccacgcctattggcaaaataaccctggaagtcagtaaagatgaatccgcggacgatcgtctgaccttccgtattctggataccggcaacggggtttcggcgaacgaaatcgacaatatgcactttccattcctcaacgatacgcaggcagacctttacggcaaagccaacgccctcaccttctggctctgcgatcgcctgacgcgcaagctcggcggacagctcaatatcaaagcgcgcgaatcgctgggtacccgctactccctgcatctaaaaatggccgccagcgcggaggagagtgattcgggtgaacatctgctggatgaagtggtgatcatgcttgatgtgaccgccaatgaagtccgccgtatcgtgacccgtcagctggagagctggggagctacctgcatcactccggatgacagaatcacaagtcaacaatatgatctctttttaacggataatccgtctaatcttactgcttcgggcttgcttttaagcgatgatgaagcccgggttcataagattggtcctggtcagctccgcgtaaactttaatatcagcgctgcgctgcaggaagctatcctgcaattgattgagcagcagcttgctgaggaagaggagcagccatcctctcccgggaatgaaagtaacgccgaactgcatgccagcggctattacacgctgtttgctgacacggtaccagatgatgttaagaggctgtataatgaactggcgacgggcgatttcgccgcgctggcgcaaaccgcccaccgcctcaaaggggcatttgctatgctaaatctggtacccggcaagcagttatgtgaaacgcttgagcatctgattcgtgaaaaagatgcgcaaggcatagaaaaatatatcagcgacattgacgtttacgtcaagagcttgctgtagcaaggtagcctaatacatgaacaatatgaacgtaattattgccgatgaccatccgatcgtactgttcggtattcgtaagtcacttgaacaaattgagtgggtgaacgttgttggcgagtttgaagactccaccgcattaattaacaatctgcctaaactggacgcacacgtcctgattaccgatttatcgatgcccggtgataaatacggcgatggcattacgcttattaaatacatcaagcgtcatttcccggacctgtcaatcattgtactgacaatgaacaacaacccggcgatcctgagcgcggttctcgatctggacatcgaagggatcgtcctgaaacagggtgcgccgaccgatctgcctaaggcgctcgccgcgctgcaaaaaggcaaaaaattcaccccggaaagcgtttcgcgcctgctggaaaaaatcagcgccggcggttacggcgacaaacgtttgtcgcccaaagagagtgaagtactgcgtctgttcgccgaaggcttcctggtcaccgagatagccaaaaagctcaaccgcagtatcaaaaccatcagtagccagaaaaaatcggcgatgatgaagctcggcgtggaaaacgatatcgccctgctcaactacctctcttccgtttccctgagctcaacggacaaagactaacgtctctcttcccggatagcgcggcgctatccgggaaacatcttttattccctgcccttacgtacccgcgcggcgtagaccgtcagcgtctgcttgataatatccagagtgaccggttttgaaaggcagctgtccataccggactccaggcagcgctgcttctcctccgccagcgcgttggcggtcaccccaataaccggcagcgtaagccctagctggcgaatgcgctgggtcaggcgataaccatccatattcggcatgttgacgtcgctgagcacgatatcaatatgctgcttgctcaggacattcagcgcatcgaccccgtcatttgccgtcacgcactgatagcccagcgatcccagctgatcggccagcagacgtcggttaatcggatgatcgtccaccaccagaatcatcatgtcatcattgctggcggtttgcgcatccgccgcggatagcgcagggccgttttccgtactggccatggcaatatggaagatgcgggccagcagcggcagcagctcgtgcggcgtggccacgctatgcagccactcgccgggcgcccgctcctgcggaataccgatatgccgacgagagaagatcaccatcgcgcagccgtcccaggcgttacgcgtctcgctatcggtcaacagaatatcctccgcgcccggcgcttgcccggcaaaatgacggaccggaataccgtggtatttcagcaactgctcgacgaacagcgccagcgagctgttatcaatcgccagccagcagcatttttccgccaggccatcaatattcggcgacggcgtattttgtacgccataaagcgggatacgaatagtgaagcggctgcccataccaggctcggtttcaacggcaatatcgccatccatcatgctgataagcttttcacaaatcgccagaccgagtccggtcccctggaaattgcgctgcacgccggtccccacctggaagaacgggtcaaacaggcgtacgacctctttcgccgggatcccttccccggtatcgcgtacgctgatgcgcagataatcctccgcccgctctacgtgcaggataatgcagccggtatcggtaaacttaatcgcgttactcagcaggtttgaaataacctgctgcaggcgcatcggatcgccggacatcagctgcggtacgtcaggttcaataaagcagtacagcccgagatgtttccgcaccaccagcggcagatagttggcggaaatatggttcatgacctcgcgcggcgaaaactcccgcggctcaattttgagctgttcggactcaattttcgagaaatcgaggatgtcgctaataattttcagcagcaggctggaagagttgttcatcgccgtcaccagacgatcgacgcccttcggtagctctttggtctgcaataaatcgaggttaccgataatcccgtacagcggcgttcgcagttcgtggctgacggtggcaaggaacatcgatttcgactggctggcctgctcggcggcctgggccatctcctgcagcgactcttccattttgacgcgcgcagagacatccaccagcacgcaaatcgccacgttctcgttacggtagcgcgagtggacaaagctgatttgcagattggtattgttgctggtcagcacatcgacgaagttcacctgctggccgcagataatttgcgtcagccgctgccgatcctcatgggttagcatattgagatagttatgcgccagctcgttactcaggatattggtgccgtcgatcgtacgtaaaatacagatccccaccggcgcggaggcaacgatttttcggttgaactgctcgtgctcttcgaggcgctgggcgtcgttttcagccggaataaaaatccgccgttcatacatgcgggcaagcgcaaaaaggagcccgccggtaagcagattgagcaccacggcgttcagtatcagcatccggatgcgttccagtacctgatccaccggcaccgaatagacaatgctcaacgatgacggcggcaggctttttttcatcgccagctcgcgaaaaccggcggtatagccgaaccacagacgctcctgcatccacttcgcatccggtttaatattgctatccgacccggcaagcgagatcagcgtctgtccgctatcgtcgagaatcgtcacgttcatcggcaaactgcctggggtaaagaagctttccatgcggatggtttgctctacgccaagcatggcctgcaggcgattcgccacatagattggggtcagcgcatagaaatagccaacgcccggacgcacgccctggcttatccagaacagattgttaccgcgctcgttttgcggcgcgtcgcgatactgctcaatgcgctgatgcagcacttttaacgcctggtcccgctccagcggaatatcgcgcaggccgaagttggccatacacagattgtcgctaccaatcataaaaatacgattgaggtcgtaggccgttgagaaattgtcgcgccagtagcgcataaaccacgccagtgactgcagcgagttacgccaggtcgtactcatcagcgcgcagtcggaatccgggtagagcggttcaaaatcagggatcgtaatatcaccgcgctgcaccggcgtatcgccgccttcgctaccgtccatcggccggttgccggcaacgtatttcagctctttgatcacatcggccgtacgctgtatgtagcgctgcgcctgatcggcattgaggttaaattcctggcgaatttccgattcgcgatcgtgcaacgcattgacgatgtaaaacaccgaaacaaaagcgaccagcacccacagcagtatcgccagcgctctgaacagatagcgtgaaacctttaacgtgttatggaaagaagctagatatttcaatgtggcgatgctcggccgtcaggggctcaacagaatggcgttaaggtaacgataaaacaacggtcccgcaacgggaaaacaaaaagggccggggagagccccgaccctttcagacaattaccgcagagaattactcttcgtcttcggcgatgtcatcgtcagtatccgcttccggcgcgatatcttcgtcgccttccgccgcgctgccgtcgatggcatccagctcttcgtcatcaaccggctcagccacgcgctgcaggccgaccacgttttcatcttccgcagtacgaatcaggatcacgccctgagtgttacgaccgacaatgctcacttcagatacgcgggttcgtaccagcgtgcccgcgtcggtgatcatcataatctggtcgcagtcatcaacctgcaccgcgcccacaacggaaccgttgcgttcggtcactttgattgagataacgccctgggtcgcacgcgacttagtaggatactcttcagctgcggtacgtttaccgtagccattctgcgtaacggtcaggatcgcaccttcaccgcgcggaacgatcagagaaaccactttgtcctcgccggccagcttgatgccgcgcacgcctgtggcggtacggcccatcgcgcggacggcgtcctctttaaagcgcaccactttaccggcggcggagaacagcatgacttcgtcctgaccggaggtcagatcgacgccaatcagctcgtcgccttcgttgaggttaaccgcgataataccggcggaacgcggacggctgaattcagtcagcgccgttttcttcacggtaccgctggcggtcgccataaagacgttcacgccctcttcgtattcgcggaccggcaggatcgcggtaatacgctcgttggcttccagcggcagcaggttgacgatcggacggccgcgcgcgccgcggctggcttccggcagctgataaaccttcatccagtagagacgaccgcggctggagaagcagaggatcgtatcgtgggtgttggccaccagcaggcggtcgatgaagtcttcttctttgatacgcgccgcagatttacctttaccgccacgacgctgggcttcgtagtcggtcagcggctgatacttcacgtagccctgatgcgaaagggtcacgacaacatcttcctggttgatcaggtcttcaatgttgatatccgcgctgttcgcggtgatctcggtacgacgcgcgtcgccgaactgttcacggaccagctccagctcttcgcggataacttccatcaggcgatcggcgctgcccagaatgtgcagcagttccgcgatctgttccagcagctctttgtattcatcgagcagtttttcatgctcaaggccggtcagcttctgcaaacgcagatccagaatcgcctgcgcctgctgttcagtcaggtagtactggccgtcgcgtacgccgaactcgggctccagccattccggacgggcggcgtcatcgccggcgcgttccagcatcgcggaaacgttgcccagatcccatgaacgggcgattaaggcagccttcgcttccgccggggtcggcgcgcggcgaatcagttcgataatcggatcgatgttggccagggcaatcgccagcgcttcgaggatgtgcgcgcgatcgcgggctttacgcagttcaaaaatcgtacgacgggtcaccacttcgcggcgatggcgcacgaacgcggcaataatttctttcaggttcatgatcttcggctgaccatggtgcagagcaaccatgttaataccgaaggagacctggagctgggtctgcgaatagaggttgttcagcaccacctcacccaccgcatcgcgcttcacttcaatcacgatgcgcataccgtctttatcggactcgtcgcgcagcgcgctgatgccttcgacgcgtttgtctttgaccagctcggcgattttctcaatcaggcgcgctttgttcacctgatacggaatttcatgcacgatgatggtttcgcggccggttttcgcgtcagcttccacttccgcgcgcgcgcgaatgtacactttaccgcgaccggtacgataggcctcttcaatgccgcggcgaccgttgatgatcgcggcggtcgggaagtccggacctgggatgtgttccatcagcccttcaatgctgatgtcttcattttcaacgtaggccagacagccgttgatcacttcggtgaggttgtgcggcggaatattggtcgccatacctaccgcgatacctgacgaaccgttgactaacaggttcgggattttggtcggcataacgtcagggatcttttccgtgccgtcatagttatcgacgaaatccaccgtctctttttcgaggtcggccatcagctcatgggcgatcttcgacatacggatttccgtataacgcatcgctgcggcggagtcgccgtcgaccgaaccaaagttaccctggccatctaccagcatatagcgcagggagaatggctgcgccatacgtacaatggtgtcatacacggcagtatcaccatgagggtggtatttaccgattacgtcaccaacgacacgggcagattttttataggctttgttccagtcattgcccaatacgttcatggcgtatagtacgcgacggtgtaccggcttcaggccatctcggacatccggcagcgcacggccaacaatgaccgacatcgcataatccagataggagctcttcagctcttcctcaatgttgaccggtgtaatttctctcgcaaggtcgctcatctaaccgctatccctctactgtatcccggattcaaaggtcgcaaattataacacagccgcggtgatacgggtaaacctatacccaatgattttcgcgcggcgaaaggcgacagggatagacggtttattcatccctgaggcctgatatactcgcgggtctgaactgaacaggagtaaaagcgcccatgaatgccgaaaaaccgtcggtggcccacaatgttgatcataatgaaatcgctaaatttgaagccgtcgcctcgcgctggtgggatttagagggcgaattcaagccgttacatcgcatcaatcctctacgcctcggctatatcgcggagcgctccggcggcctgtttggcaaaaaagtacttgatgtcggctgcggcggcggcatcctggcggaaagcatggcccgggaaggcgcagcggtgaccggtctggatatgggcttcgaaccgctacaggtggcgaaactgcacgccctggagagcggcattcaggtcgaatatgtccaggaaaccgttgaagagcacgcggcgaagcacgccggagagtacgacgtcgttacctgcatggagatgctggagcacgtcccggatccgcagtcggtcgtccacgcgtgcgcgcggctggtcaaacctggcggtcaggtgttcttctcaaccattaaccgcaacggtaaagcgtggctgatggcggtcgtcggcgccgaatacatcatgaaaatggtgccgaagggaacccacgacgtgaagaaattcatcaagcccgcggagctgatcggctgggtagatgagacaattctgaaagagcagcatattaccggtcttcattacaatccgttgaccaataccttcaagctggcgccaggggtggatgttaactatatgttgcatacaacggcgaaaaaagcataacgtcagctgtatttcctatgatgattgcgcggcatcaagccgcgtgattttttcttccgatgaagaaatcagcactcgatcaaattttcatttttttttctgatttattgacatcttctccaggccttatgtggcgtggacttggcgattattacccttccgcaacctcaatttaacgtcaaaatcaactcttgtactcaaaagaatccttactagaatactcaccatatagcgtttcttttatcgaccaccccctacatatagtatttatccacagagttagtcacaacggcgttctgtggataagtgggggatattttctttcacggacaggtataatccacatgaatcagagtctgctggtgacaaagcgtgacggtagcaccgagcgcatcaatctcgataaaatccaccgcgtgctggattgggcggcagaagggctgaataacgtatccatctcccaggtagaactgcgttcccacattcagttctatgacggcatcaaaaccgccgacattcacgaaaccattatcaaagccgccgcggaccttatctcccgcgaggcgccggattaccagtatctcgccgcccgtctggcgattttccacctgcgtaaaaaagcctacggccagtttgagccgccagcgctgttcgaccacgtgtcgaaaatggtgaaaaacggcaaatacgatactcatctgctggaagactacacggaagaagagttcaagcagatggactcgttcatcgagcacgagcgcgatatgaccttctcctacgctgcggttaagcagctcgaaggcaaatatctggtgcagaaccgcgtcaccggtgagatctatgaaagcgcccagttcctgtacattctggttgccgcctgcctgttctccaactacccgcgcgagacgcgtctgaactacatcaagcgtttctatgacgcggtgtcgacgttcaaaatctcgctgccgacgccgattatgtccggcgtgcgtaccccgacccgtcagttcagctcctgcgtactgatcgagtgcggcgacagcctggattctattaacgccacctccagcgccattgtgaaatacgtctctcagcgcgccggtatcggcatcaacgccggccgcatccgcgcgctgggtagcccgattcgcggcggtgaagctttccataccggctgtatcccgttctataagcacttccagacggcggtgaaatcctgctcccagggcggcgtccgcggcggtgcggcgaccctcttctacccgatgtggcatctggaagtcgaaagcctgctggtgctgaaaaacaaccgcggtaccgacgccaaccgcgttcgtcacatggactacggcgtacagatcaacaagctgatgtacacccgtctgctgaaaggcggcgatatcaccctgttcagcccgtccgacgtcccgggcctgtacgatgcgttcttcgccgaccaggacgagttcgagcgcctgtacacccaatacgagcaggacgacagcatccgcaagcagcgcattaaagcggtagaactgttctcgctgatgatgcaggaacgcgcctccaccggccgtatctacatccagaacgtggaccactgcaacacccacagcccgtttaacccggttgtcgcgccggtgcgccagtccaacctgtgcctggaaatcgccctgccaaccaagccgctggaagatgtgaacgacgaaaacggtgaaattgcgctgtgtaccctgtccgctttcaacctcggcgttatcgatagccttgatgagctggaagagctggcggtgctggccgttcgcgcgctggatgccctgctggattaccaggactacccgatcccggcggccaaacgcggcgcgatgggccgtcgtacgctgggtattggggtgattaactttgcctactatctggcgaaacacggtaaacgctactctgacggcagcgctaacaacctgacgcataaaacgttcgaagcgattcagtactacctgctgaaagcctctaacgagctggctatcgagcaaggcgcgtgcccgtggtttaacgaaaccacctatgcgaaaggcattctgccgatcgatacctacaaaaaagacctggacgctatcgtcagcgaatccctgcattacgactgggagcagcttcgcgagtcgatcaaaacgcacggtctgcgtaactccacgctctccgcgctgatgccgtccgagacctcttcgcagatctccaacgccaccaacggcattgagccgccgcgcggtcacgtcagcatcaaagcgtcgaaagacggtatcctgcgccaggtggtgccggattacgaaaaactgcagaacggctacgagctgctgtgggaaatgccgaacaacgacggttacttgcagctggtcggtattatgcagaagtttatcgaccagtcgatttctgctaacaccaactacgatccgacgcgcttcccgtctggcaaagtgccgatgcagcagttgctgaaagacttgctcaatgcctataagttcggcgtcaaaacgctgtactatcacaacacgcgcgatggcgcggaagatgcccaggatgacctggcgccgtccatccaggacgacggctgcgaaagcggcgcatgtaagatttgataatattgcccggcggcgcgttgcctgccgggcctacggtctaatgtaggtcgggttagcgaagcgccgcccggcgtataattccaggacaggatccccactcatggcatacaccaccttttcacagacgaaaaatgaccagctcaaagagccgatgttcttcggtcagccggtgaacgtcgcccgctacgatcagcaaaaatatgacatcttcgaaaagctgattgaaaagcagctctccttcttctggcgtccggaagaagttgacgtttcccgcgaccgtatcgactatcaggcgctgccggaacacgaaaaacacatttttatcagcaacctgaaatatcagacgctgctggactccatccagggccgcagcccgaacgtcgccctgctgccgctgatttcaattccggagctggaaacctgggtggaaacctgggcgttctcggagaccatccattcgcgctcctacacccatatcatccgcaatatcgttaacgatccggcgatggtatttgacgatatcgtcaccaacgagcagattcagaaacgcgcggaaggcatttccagctattacgatgaattgattgagctgaccagctactggcatctgctgggcgaaggcacccacagcgtgaacggtaaaaccattaccgtgaacctgcgcgagctgaaaaagaaactctacctgtgcctgatgagcgtgaatgcgctggaagccatccgtttttacgtcagcttcgcctgctctttcgcctttgccgagcgcaagctgatggaaggtaacgccaagattatccgcctgatcgctcgcgacgaagcgctgcacctgaccggcactcagcacatgctgaatctgctgcgttccggcgtcgacgatccggagatggcttcaatcgccgaagagtgcaaacaggcgtgctacgacctgttcgtgcaggcggcgcagcaggaaaaagagtgggcggattatctgttccgcgacggttcgatgatcggcctgaacaaagatattctctgccagtacgttgagtacattaccaacatccgcatgcaggcggtaggtctcgatctgccgttccagacccgctccaacccgatcccgtggatcaacacctggctggtgtccgataacgtgcaggtcgcgccgcaggaagtggaagtcagctcttatctggtcgggcagatcgattccgaagtcgacgctgacgatctgagcaacttccagctctgatgaaacgcattttcttgaagatttctgacactcgccttgagtgtcaggatgaacatccctccctgctggcggccctggaatcgcacaatatcgacgtggagtatcagtgccgcgaaggatactgcggatcgtgtcgtctgcgtctggtttccggtcaggttgactggctcaccgagccgctggcgtttgtccagccgggagagattttgccctgctgctgccgggcaaaaggcgatatcgaaatcgaaatgtaagccagcctgaaacgcattcccattctttatagggttcgttttttacgaaccctgggttcgtcttcctatccctgttcacctccccccactccgcctactctacctgtataagccaccggataaagccatcagcaatgatcgcagcaacgctggctgatgctctgcgtcacgacattcatgaggagataaaaaatggcttccgtcaaagaggaaaactgcgccaacggactgaaaaaagcatacgacgtcatcgtggtcggtggaggttcggcgggtgcggtactcgccgcacgtctgagtgagaaccccgattgccaggtagcgctgctggaaggtggccccgttttcgcccctgatgcctggccggacgagctggcgcacagccactctgttggtggcggcgattacgtctgggagcgcggggtagcaacgggaaccgatcacacggccggtcatctgcgggcaaaagtacttggcggcgggtcaacgatcaatgccggcgcgtttgttcgcgcccccaaatctgattttgaccgttgggtcaagcgcggcctgagcgactggtcgttcgataaggttttaccctggttcaaacggcttgaaaacgccgactatggcgacgatcgctggcatggtcgccacggcccggttccggtgcggttaccggcgctggaaacgctcagcccggcaagccaggcgttttatcatgcttgccgcgctcacggcttcgccgccgttgacgatatcaacggcgcgcagcagcacggcgtcgcggtctacccggtcaatgttgtcaacggcatccggcaaaataccgccatggtctacctgacggcagacgttcgcgcgcgcaagaatctgtcgattgtcggcatgacggtcgtggataaagcgttgattgaaggttcgcgcgtgaacggcatacagctggcggacggaacacagatcgctaccgacaacgtattcctgtgcgccggcgcggccggtacgccagcgattctgttgcgctccggcattggccctgcggacgatttacgccatctggagatcacggtgaaacaggatctccccgttgggcgcaacttgcaggaacaacccgtgaacgggatcatgctggcaacgtccgctaagcatgccagttatccccctataggcacaacgctctggacgcaatcttcgctggcggcagccaacgaactggatctctatatcagcaataaccacttcgtcgatcctgaactatttccacatggtgcgggtttccagctctttttcaccgtggcgcgcccctttgcccgcgggcgtctgactttggcgagccgcaacccgctgctcggcccccgtatcgatctcaatttactgggtgacgagcgcgacgtcacgcgaatggtcgaagcggtgaaattatcccgggcgctggtgcaggaaggtccgctacaggcgctggtgattggcgaagtcccgatggtaaaaggcggtacactggcagaaacagaccagcagatagcagaagaacagcgtaagacggtgaaaagtaacctgcacctcagcgcgactgcgccaatggggaacgaaagcgatcccatcgccgtcgtggacgcctgcgggaaagttttcggtattgccgggctgtttgtcgtcgatgcctcgctgttcccggacgttccctctcaggcgaccaatccggatgcgatcatggcggcagaatatctcgccagccgtttttctggcgcatagaacgaggcatagtcaaccgcaagacccgaaaaaggagcgcctgtgtgaacaagttcgtggaaatgagcacgtttatttcggttgttgagtctctgagctttgtcggcgcggcggcaaaattggggacatcaaaatcggtagtcagccagcgcgtcaagatgctggagaaacggcttggcgccagcttactggagcgcgggccacggcttagcctcacggaggcgggcctgctattttatcaggagtgcgtacggctgcttgacgaagtcacgctggcagaagaggcggtggccccgtcacgcagcgagcttcggggcgggctgcggattgccacctcgcatacgtttatgaccactcatctatcgacaattctggccggttttatccgcgaccatccggggttgtctctcgatatcgcgacggaggaccggcagatcaatatgcaccagcccgactttgatatcgccatccgcctcggcctcgtcccggactcaacgctcatcgcccgaacgctggcgcgcaacctgacctggctctgcgccagcccggactatctgtcgcaacggggcacgcctttgcatcctgttgaactggagcagcatgacgggctgctatatacccatcgcgcgccggggggctgctggcagttgctgcataacgggcagcgccagacctggcgggtcaaaaatcgtctgcgttcggataacgccttcagcctgctggaggccgccagaatggggcttgggattgtggtcatgccgctatttttaggcgctgaagcgatcgtgcggggagagctaaaaattattttacccgactggcagccggagggtggcaacattgtggcgctgtatcgccagacgcgtcgcgcctcgccagtgattcaggcgctggtcaacgaggttgcggaaaagctggggccagagccagagtgggaaaaacagctacgactggccgggctgctgcccctctgcaacaggggcgcaagcgcccctgattaatggcttactttttattgaggaacttcaccgccttatccgggaaatccgtaaacaacccgtccacgtccgcctggttatacaggacgtcgtaaagctgctccacgtccgctgcatacgctggcagctgatccgcgcggaccgtatacggatgcacctgcagcttgctggcatgggcttctttcaccatcgccgtcagcttcacgtgacccggcgtcgagccttccgccaccagcatatggtagtccgggccaatgccgtcagcgtactgcgcgatctgcgccatcgcccccggtttgaacatccagtcatagctgtagttcacccacttgccgtcggcctgccgctgctgggtctcattccagtcggtataggcgataagctgcaccagattgagatccatccccattttcggctccagctcctgcttgatgcgcttgagctcgttggcgtcaaagcactgcagataaaccttatcctgcttgccggtgtagccatatttcttcagcacgttcagcgtgctggcggcaatatccttgccttcctgatggtggaaccacggcgctttgatctccgggtagatgccgatgtttttgccggtcgaatggttcagcccctgcacaaactcaatctcctcttcaaaggtatgaatacggaaatcagatttacccatcgggaaacggcccggataagtttgcacgttcttgccatctttcggctcaaacccttcggtaaacttcagcgactttatctcggcgagggtaaagtcgatggcgtagaagcggccatcttgacgcgcccgctgcgggaaacgctgggccacgtcggtcacccgatccagatagtggtcatgcagcaccaccagccggtcgtctttagtcatcaccaggtcttgctcgaggtagtccgccccctgcgcgtaggccatcgctttcgccggcagggtatgttccggcagatagccgctggcgccgcggtgggcgataacgattttctcccccgcgacggcgctgaaagagagcgccgtcgcagccagcagcattccgctcatcagggtggttaatgtgcttttcatcgccgctccttaagcttgtttcatctgttggtgatggcgtcgttcgcccagcatcacgataatcagcagcaggaccgccagcacgctgccgccgatcattaccataaagccgccgtcccagccgaagaaatcgacggtatagccaacgatggcgctcgcggccacggagccgccgagatagccaaacaggccggtgaagcccgcggcggtgccggcggcttttttcggcgccagctccagcgcatgcaggccaatcagcatcaccggaccgtaaatcaggaagccgatgatgatcatgcaggccatatccacgcccgggttacccggcgggttcagccagtagacgacggtggcgatggtgaccagggtcataaagaagacgccggtcgcgccgcggttgcctttaaacactttatccgacatccagccgcacagcagggtgcccgggatccccgcgtattcataaagaaagtaggcccaggacgatttatccagcgcgaagtgcttaacctctttcaggtaggtcggcgaccagtcaagaatgccgtagcgcagcagataaacaaacacgttcgcgatagcgatgtaccacagcagcttgttcggcaggatgtactgcataaagatctgctttgcggtcagctcttcttcgtgcttctcgctgtagtcgtcaggataatcgtttttgtactcttcgatcggcggcaggccgcaggactgcggagtatcgcgcatcatcgcgaaggcgaaaatcgccagcaggatcgcgccgaaagccggcatatacagcgccgcgtgccagtcgttaaaccacgccatccccagcagaaacagcagcggcgggatcccgccgccgacgttgtgcgcgcagttccataccgaaacaataccgccgcgctctttctgcgaccaccagtgcaccatcgtacgtccgcacggcggccagcccatcccctggaaccagccgcacaggaacagcaggacgaacatcaccataatgctggaggtcgcccaggggacgaagcccatcaccagcatcaccagcgcggcaaggatcaggcctgccggtaaaaaaatgcgcggattcgaacggtcagaaaccgaacccatgatgaatttcgaaaatccgtaggcgatagagataccggaaagcgcaaagccgagatcgccgcgggagaacccctgctcaataagatagggcatcgccaaagcaaagttcttacgaaccagatagtaagcggcatatccgaagaagataccgataaagatctgccagcgtaatcgacgatatagcggatcgatttccgccgttggcaaacgcgctttatgcgctgcgggtttaaatatacttaacatatcagcctccgtggccattgctgttcttctgacgtcgtcgcaaaaaaacgtaatttattcactgacttctgatttggtcgcgatagtaggcaaagcgtaaatctaatactgtgaaatgtcgcacactttgttacagaaatatgacagaactttccaatatgcgcataaagtcacaacaaacgctcgaattacgcgcaaatatgctcgaaatcaaacattaaacgcggtcgatatggctaaatgatgtaaaacgaacacagaggacagggagatggccgatagtcgtgaatatgacgtcattattattggcggcggcgccaccggcgccgggatcgcgcgcgactgcgcgctgcgcgggctgaaggcggcgctggttgagcgctacgatatcgccaccggggcgaccggccgcaaccacggcctgctgcacagcggcgcgcgctatgcggtaaccgatagcgaatcggcgcgggagtgtatcagcgaaaaccgcatcttacgccgcatcgcccggcactgcattgagcccaccagcggcctgtttattaccttgccggaagacgatccggcgtatcagcacacctttatcaccgcctgccagcaggcgggtattgaggcccagcctctgacgcccgccgaggcgctgcgcattgagcctgcggttaacccggcgctgctcggcgcggtgcaggtccccgacggcaccgtcgatcctttccgcctcaccgccgcaaatatgctcgatgcccgcgaacatggcgccgctatcctcaccggctgcgaagtcaccggcctgctgcgtcagggcgatcgcgtccatggcgtcacgatctacaaccatcagctccgtgaatcgcgcacgctgcgcgcgcaggtggtggtcaacgccgccgggatctgggggcagcgcatcgcagagtatgccgacctgcgcatcgcgatgtttccggcaaaaggatcgctgttaatcctcgaccatcgcattaaccgtcaggttatcaaccgctgccgcaaaccggctgacgccgatatcctggtgcccggcgatactatttcgctgattggcactacttcgatgcatattccctatgacgaaattgacgacaaccgggtaacggccgaggaggtcgaaacgctgctgcgcgaaggggaaaagctggcgccgatcatggggcggacgcgggtactgcgcgcctactccggcatacgtccgctggtcgccagcgatgacgatcccagcgggcgcagcgtcagtcgcggtattgtgctgctcgaccacgcccggcgcgacggactggagggctttatcaccatcaccggcggtaagctgatgacctatcgtctgatggcggagtgggccacggatgcgctctgccgcaagctcggaaataccgtcccctgtacgaccgccgatacgccgctgccgggctcgcaggagccggcggaagccacgctacgcaaaatcatctctttacctgcgtcgctgcgcgggtcggccatctatcgccacggcgatcgcaccccggcctggcttggcgatagccgccagcaccgcagcctggtctgcgaatgcgaggcggtgaccgccggcgaggttcagtacgcggtcgaaaacctggcggtgaaaaacctgctcgacctgcgccgccgcacccgcgtcggcatgggaacctgtcagggcgaactgtgcgcctgccgcgccgccgggctgctcgcgcgttttaacgtcaccacttccgcacgatcccttacccagctgtctcaatttttgaacgaacgctggaaaggcgtccagccggtggcctggggggacgcgctgcgcgaaagcgagttcacccgctgggtctatctcggcctgtgcggattacaaaaggagcatcaggatgaagtttgattgcgccatcatcggcggcggcctcgccggactgctctgcgggctggcgctcaaccagcgcggcctgcgcagcgtgattatcagccgcggccaaagcgccctgcacttctcttccgcctcgctggatttgcttaccacgctgccgaatggcgacaccgtcaccgatgtcgctcacggcatcggccagctggcccgccagcttcccgaacatccctatgccaggctcggcgccgaacgggtgatggattacgcccgccagagtcaggcgctgtttgccgactgcggtatcgccatgcagggcgacgccagccagccgcatctgcgcgtgacgccgctgggaaccttacgcgcggcctggctatctccgcaggaaatcgccagcgcgccgctgcccgccagcggcgtcggcgtggtcggcatcagcggattcggcgacttccagccgcatcttgccgccgcctctctgaaccagcacggcgtgaccgccgaagcccatgagatagatttacctctcctcgatgtgctgcgcgatagcccatccgaatttcgtgccgccaatattgcccgccggctggacgatgaagcgcactggccggccctgctggcggcgctgcgcccgctggcgcagcggcataatttactgattatgcccgcctgctttggcctcgccgacgatcgcctgtaccagtggctgcagcagcgcctgccctgcccgctgcgcctgctgcctacgctgccgccgtcggtgccggggatgcgcctgcacgcccagctgcagcggcaatttatccgcagcggcgggacctggctgaccggggatgaagtcatcgatatcagccaccgcaacggtagcgttaacgcgatctggacgcgcaatcacggcgatatcccgctgcgcccgcgcttcgcggtgctggccagcggcagctttttcagcaacgggctggtcgccgagcgcagcggcgtgcgcgagccgatcctcggccttgacctgcagcagacgctgccgcgcgagcgctggtatcagcaggacttttttgcctctcagccctggcagcgtttcggcctgaaaaccgatgcggatctgcgcccgcagcttcaggggcagacgctggaaaatctgttcgccgtaggcgcgatcctcggtggttttgacgccatcgcgctgggatgcggcggcggcgtttgcgcggtgaccgcgctgcatgctgctgggttaatcggcgagcttgccggaggtgaatcatgaacgatacgcgctttgaacactgtataaaatgcaccgtttgcaccaccgcctgcccggtcagccgggttaatccgcgctatccggggccaaaacaggccgggccggacggcgaacgcctgcgcctgaaagacggcgcgctctacgacgaggcattgaaatactgcatcaactgtaaacgctgcgaagttgcctgcccttcggacgtcaaaattggcgatattatccagcgagcgcgcatggagcacggtcggcaaaagcccacgctgcgcgatgcgatcctcagccataccgacctgatgggcaccctctccacgccgtttgccccgctggtcaacgccgccaccgggctgaggccggtacgccaaatccttgatgccgcgcttaaaatcgatcaccgccgcacgctgccgaaatatggctttggtacctttcgccgcgcgtatcgtcagctggccgcccggcaggggcagtacgccgagcaggtggcgttttttcacggctgctatgtgaactacaacaatccgcagctgggcaaagatcttatccgcgtgttcaacgccatgggcatcggggtgcagttattgagcaaagagaaatgctgcggcgtaccgctgattgccaacggtttttttgcgaaagcgcgcaagcaggcgctgagcaacgtcatcgcgatgcgggaaaatagtctgcccattattgcgacttcatcgacctgcacctttacgctgcgcgatgaatatccgcatctccttgatatcgataatcacgatatccgcgaccggattgagctggcgactcgctggctctggcgtcagctggataatgggcgacctctgaagctaaaaacgctgccgctgaaggtggtctatcacacgccctgccatatggaaaaaatgggctggtcgctgtatacccttgagctattgcggctgatccccggcttgcagctggaggtactcgactcgcaatgctgcggtattgccggcacatacggtttcaaggcggagaactacgactcatcgcaggcgatgggcgcgccgctgttccggcaaattgaggagagcggcgcggatctggtggtgaccgactgtgaaacctgcaaatggcagatagagatgtccaccagcaaacgctgcgaacaccccatcaccctgctggcacaggcgctggcctgacgccagcgccagcaccggggggctagtagctcccctttccctccgcctgttcggctatcggcttgaacatcgccagccgtttatccagcgcgctggtgtaaaggttggtatcgacgccaacggcaacaaaattcgccccccacgccagcgctttgtgcgccatctccggatcgacggcaaggaatccggccgccttacccgccgcgcgaatgcggcggatgctctgttcaataacccgctgcacttcaggatgaccggcgttatccgggtagcccagcgaggctgacaggtccgccgggccgataaacacgccgtcaatgccctccacttcaaggatcgcatccagattatcgagggccgttttactctctacctgaatcaacaggcacagcgcatcgttggcctgcgccatatagttttcgacccgtccccagcgcgcggcgcgggccactccggcccccaccccgcgggtacccagcggcgggtagcgggtagccgagacaatctcccgcgcctgttcggcggtatcgaccatggggatcagcagcgttctggcgccgatatccagcacctgtttaatcaggctgcgattgccctctaccgggcgaatgaccggctggctggcgtagggcgcaatggcctgcagctgatgataaagatcctggatggtattgggcgcatgttcgccgtcaatcagcagccagtcgtaacccgaggtggcggcaatctcagccatataagaagaggtcgagctcagccacaggccaatttgcgcttccccttgtaataatcccgctttaaatgggttcgataaaattgcgttcatagttctcccttacattaatgctgtacgctgccagcctgcggcacggcgcggttcacgcgcagtgaaaagataataaccaccccgacaatcgccacgcaggcgagcgtcactaatccggcagaatcactggcgaacatggtttcagcctggacgcggataatgggcgccagaaacccgccgatagcgccgaacaggttcacaaagccgatgccagcggccagcgccgtaccggacaacagctgcgtcggcatggtccagaagaccggctgcacggcaatgacgccgacggcggcaacgcacagcgcgataatcgccagcaccggcgacaccagcccggagaccgcaatgccaattgccgccgccagcagggtgaatgccgccacattacgccgctcgccggtgcggtcggagtagcgcggaatcagccaggtaccgaacagcgccgccacccacgggatcgcggtcaccaccgacgccacgaaccccaccttggtgccgagcagcgcggcaacctgggttggcaggaagaagatcaggccgtaaaccgccacctgaatggtgagatagataatcgccagctgccagacgcggccgttacgcagcgcatcggacaaacgcgaggtcacctttttctgctcttcgctggccagctcgctgattaacgcctgtttttcggcagcgctcaggaagcgcgccttttgcggcgtatcgtcgagccagaagaaggtgaagaaccccgcgccgaccgccagcagcccctcaatgataaacatccagaaccagccgggatgccccataaaaccatgcatttccagcagcgcgccagagagcggcgacccgagggtcagcgccagcggcgcgcccatataaaacagccccataatgctggcgcggttctgctgcggaaaccactgggacgtcaggtagatcatgcccgggaaaaaacccgcttccgcggcgcccagcagggtgcgcaccagcagaaacttcgcttcggtatccgcccacgccatcgccgcggagagaagcccccacagcaaggtggtgcagccgatccactttcttgcgccgaatttgcgcatcagcaggttagcgggcaccccgagaaaggcgtagaccacaaagaaaatccccgctcccagcgcataggcttcgttgctcaggccggtatccagctgataggtctctttggcaaagccgatattcgaacggtcaagaaacgccagcacgtacagcgccagcataaaggggatcaaacgggcgcggtttttcttcaccacgctctcaagcaaggcgttgctcatcgtaatatcctcaacaataggccgcacatctgcgctgtgcggcacgacgggatcagtggctataaggacgtttcagattacagtcgcggttcagctccacgccgaagcccggtttgtccagcacggttttatgaatgcgcccgttcaccggtaccggctcatcaaccagaatcgggtcaaactgcggacgcatcgttgagcagtcggggctggtcatcaggaactcgctgaaaggcgtgttggtaaaggtaatgaccgcatggtgcgaatagaccgacgagccgtgcggcaccaccagctggccgcgcgatttggcgatcgccgcaatctccaccagcgtggtcaggccgccgcaccagcccacgtcaggctgcataatatcgatgccggtttccgacagcgtgcggaaggattgcagcgtaccgtggtgctcgccgctggtgaccatcatgccggctggcgcattacgtttaagctcgcgatagccttcatactgctgcggcggcaggcactcctcgatccacttaaggttagagggcgcgcaggcgtgggccagtttagtggcgtagttaacgtcctggctcatccagcagtccagcatcagccagaagtccgggccgcacttttcgcgcatatcggccaccatcgcagcatctttgcggatccccgcgtcgccatcgtgcggcccccagtgggtcggcattttgccgccaataaagcccatctctttcgccaggtccggacgcgccccggtggcgtagaactgaatttcatcgcgcaccgcgccgcccagcagtttgtaaaccggcagcccaaccactttgccgaacagatcccacagcgccaggtcgacgcaggaaatcgtattcatcaccaggccgccggatccggagtagtacagggtggcgttgagcatctggtcatggatcagtttgatatcgctgacgcatttgccttcgataaagcggttgaggtgtttttccacgataaagcagcccatctcgccggcggtcgataccgcaaagccggtctgcccgttttcggcttcggcctcaacgatcagcgtgccgagaacgttgatgccaaacgactggcgggactgttcatactgtttatatttgctcataggcgtggcgatatgatcgtcaatccagtgatttgccccctggtcatgataatcgccgccgccagcgcctttctctgcggtagcaccgccaataaaccaggcgcggacgtgtttaattttcggtagggtcatgatcttctccttattatgaggcttgttgttcgaaggggcttttccaccccagcagacgggaaatatctttggcgcaggcaatcgccctaccggcgaggtaatcgcgattgtcttcattgatttgcagacgggtacccaccacggaaatggcggcggtcagctcgttattggcattaaaaaccggcgccgccacgcagcgaacgtcgggatagtcttcgccgttatcgaagctccagccgcgggcgcgaatacggcccagttcatcgcgaagctgttgggcgctggtgatggtggttggcgtcgcccgctcccactgcagctcgctgataatcgactcctgaacccgctcgggctgccaggccagcaggcatttaccaatgccggaacgatataacgacaggctcttaccttcatgcgaacgcacgctgatggtggccggggattcaatcttcagaatgtagtaggcgttgccgctgtcgatgatgcccaggtggcagagcagcccgcactgatccatcagctgcgtcaggcgcgggcgcgccagttcgcgcaggtccattttgctcagcgcctgcccggccagctcaaccagcttggtccacaggcagtagttatcctgattatccatgctgaggaagcgctgttttttcagctctcccagcagcagataggcggtgcttttcggaatacccagttcgtcaataatggtcgccgcgctgcaggggccgatgcgggcgatcagattgagaatatcaatggcgcgggtcagcgccgggactttgcttgattccaacatactggactccaatcctgaatactggaatcagtgttgcggttgtcgggcgtgtaaattgtgagcgacttcaaatgacgacgctattccagccgggtggatgttcagagggagaaaaatgcgagatagtacacagaattttttaaagcaagtacaacaggctggactcatcgcgcgccgggaggggctcccgacgcggaggtgggtttacgctgagagagattcgacgacgttaatccagccgtgttcaccggccaccggctggccgttcagccagcggcgcagcatgttgagggccatcatcgcgcacacttcctgacgcacctggaggctgtggcggttggtggtgaatttcacccgcagcgcgtgggtgccgtccggcgtggaaagcgcaaagttcaggtgatcgctctcctgaccactcaccgccagcgccagaccggcaaagtgtttttcgcgccgttccgccgcccagcgcgcagactgcgccagggtctcctcctgcgccggaatgacttcgctggccaacagcggagcgttgacgcgagaaagctgaagcgccagcagacccccggtaaactgctcgctcagcgtcaggcttagctgacgctgctgcaggcgacgggcgatctgcgcaggcaggccttcggtaccttcgaaaatcatgctctctccggccaccttctgcacttccggccacagcgccagcatcgcctcgcgctgttcggcaggcccggtcagcttcagttcgataatcggcatcgaggagcgatagcccatcacgacgcccggcggcagctgcagatggtcgaggctctgcgccagttcgctttcggaacggccgaaggtggtcaggcgcaaacacagcggcgcagcggatagcgggaaacgttcgcgcaggcgcggtaagatttcctgttcaaccatcaccttaaattcggaaggcacgccgggagtgaaaaacatcaggcagcggtttagctgcacggcaaaaccgcaggcggtcccgaccgggttgttgatcatctcggcgctttgcggaatttccgcctgtttacgattgctggcggccatgggtcttccgcgctcggcaaagaaacgggtcatggtttccagccaatcttcgtgcagaattaacccttcgcctttggccgtcgccgcggccagcgcgctcaaatcgtcgctggtcggccccaggccgccgttaacgatcagcacgtcagcgtgttcgctgcgctcgcgtaaaatcgccaccagggagtcgaggtcgtcacccacggtatggcgacgcgttaagggtaatccttgattaaaaaagaaatccgccagccacgcggcattggtgtcgatgatttgcccatgcagcacttcatcgccggtggacagcatttccacgtttaacattgtgaactccagcctgataagtagaaatactatatcgcaaagcggctggtgaaaaagcctgaaaatcaggcgcggcggaataccgcgccggagagattagaagctggcgttgacgccgacgtacggaccgtccgcgaccgcgttatcgcggttgccgtctttacccgccaggttaaggtagcggtaaccggcttcgatgctcagagggcgcataatggtaaagcgcgcgccggcattggcttcctgatagctgtcgataccgctggagagtgaatcgggagagtaatagtattcgccgaacaggcggaagctgtcgccgattttccactgcagaccgccgccaaccgccgccgcgtagccctcatcgccattgttcgggttggtgtaaacgccttttccgcccacggtggccaggaatggccccaggggaatgttcaggcccaatcccagccccgccgcatcgccgtcgtcatcattgtgcagccagttgccggttaccgccaggccggtcgattccgtaccgaatccgacgccaaggttagtgtagtgctcgccggcctgcccgctgacgctgatcgcatttgccgccgtcgagacgaacatcatgccggccagggccataaatatgctttttttcatttttatctatccagaaaataataataagaaaatcccaaaaaaccgcgaaattgtactgctccgttttaaggaatcaatgcgttatagcgcgcttttaccgcgtgattgtaaccagttgcttcgggagccttgttaacggtctcagatatcaattcaatagtcagggtcaaattgctgggtctcagcctttattatacaaataggctccagcttatttcgtcgtcgcaaagagatgaataagttacataaaactttgtcaggagataaagatgagcaaaaaaggattaaccaccgccgccggcgccccggttgtcgataataacaatgtcgtcaccgcaggcccgcgcggcccgatgctgctgcaggatgtctggtttctggaaaaactggcccacttcgaccgtgaggttatcccggaacgccgaatgcacgctaaaggctccggcgcttacggtaaactgaccattacccgcgatatcacccgctatacccgcgcaaaactgtttgccgaaatcggtaaaaccaccgatctgttcctgcgcttctcaaccgtcgccggagaacgcggcgccgctgacgccgagcgcgatattcgcggtttctcgatcaagttttataccgaagaaggcaactgggatctggtgggcaacaatacgcccattttctaccttcgcgacccgctgaagtttcccgaccttaaccacgtcgtgaagcgcgacccgcgcaccaacctgcgtaaccccacctggaaatgggactttttctccctgctgccggaaacgctgcatcagttaacgattgatttcagcgaccgcggccttccgcgttcctatcgccatatgcacggtttcggcagccacgcgttcagctttattaatgccgataacgaacgtttttgggtgaaattccacttcaaatcccagcaggggatcgccaacctgatggatgatgaagcgaaacgactggtggcagaggaccgcgagagttcgcagcgcgatctctatgagtcgattgaaaaaggcgatttcccgcgctggaccttctacgtgcagatcatgccggaagcggacgccagccgggtcccttataaccccttcgatctgaccaaaatctggccgcacgctgattatccgctgatggaagtcggcgtgctggagctcaaccgcaacccggacaactacttcgcagaagttgagcaggtcgcgatgaatccggccaacgtggtgcccgggatcggcttctctccggatcgcatgctgcagggacggctgttctcctacggcgatacccagcgctatcgtctgggcgtcaaccatcatcaaattccggtcaatgcgccgcgctgcccgttccataactaccaccgcgacggcgcgatgcgcgttgacggcaatagcggtaacggcgtcacctatgaacccaacagctttggcgcgtttcaggaacagccggactttagcgagccgcctttaagccttgaaggcgcggcggcccactggaatcatcgggaagataacgactacttcagccagccgcgcaggctgtttgagctgttaagcgaagatgaacatcagcgtatgttccagcgtatcgccaatgatatgcgggatatccctgagtttattcagcagcgacaaattggcctgttcagtgaagtccaccccgactacggcgcgggcgtggctgcggcgctgaaagccttaaagcacggagagtaatgctgatggcagcccttgcggctgccattttacggtttttaaacgcgcttagtgccgaagcttagcgagccgccgcagcgacaaaccggttagctttgcgacctgagagggctcaagcccatcatccagcatcgcctgagcaatgcgttgcgtcgcctcctgctgtccttgatgccggccttcttgtcggccttcattccggccttcctgtcgaccctttcgtaaacctttttctatccccgccttcattccctgaaggaccccctctttacggccacgctcttccagaaaatgagcaatattcatcagcgtctccttatgcggcttgagtggcgtcttttgcgcgagcttgcgtaaaaaggccaccggatcggcggcgttgcccgcctgaagcatataattcagcaaagttttaaactgccgacgcgtagtgtatcccaaggataatatcctgaccagttgctcagaaatgtccatcaaatcccgctggcggatatgtttttgcagcagttccagcatagcgacacggcggtgctgcacaagccgatcgtcaggaatcaccgtgacgtctatcagtggaaaacgctggctatacagccgctcggccacctctggctgagggaaatcatccagccagcgcgtcgagtacgggtaaggagcgatcctgccgtgataaaatagtagaggaataaccagcggcagctgatgatgccctttatcaaggtggcgctgcatggccgcgatggcgtatcgcatcaggcgaaacgccatatgcctgtagggagagctttgatgctctataagaatgtagatgtacccctctccgtgctgggtttttaacgaataaagaatatccgaatggcttgcgcgtaggtcctcttcaataaaactgccggattccagctgcagcgttcgcagatcgcactgttcccgccaatgcttcggcaaatgaatagacaaaaaatcgcgcgccgttgcccgttgggacaaaaggtgtttaaacaccgcatcgtgcggtgagtggcttgctatctgttccatgatggcccctgacccgttaacctacgctcaccctaccaccgcacgcgttcgccgcgcgttttcgcttgcggtttgccgaggcggctcgcaaactgggccttcccgttatttatccctgtcatcagtaaggagaaatcatgcgtcaaaggactatcgtctgcccgctcattcaacatgaaggccactatctgctgtgcaaaatggccgacgatcgcggcgtatttcccggccagtgggcgctctccggcggcggcgttgagccaggcgagcgcattgaagaggcgctgcggcgagaaattcgcgaggagctgggcgaaaaactgcagctgacccagattacgccgtggacctttagcgacgatatccgggttaaaacctacgccgatggccgccgggaagagatttatatgatttacctgatcttcgactgcatcagcgccaatcgcgaagtgacgatcaacgaggagtttcaggactacgcctgggtgaaggcagaagatcttccccactatgatttgaacgcggcgacccgcaggacgctcaccctgaaaggcctactctgaacaagcgcgcaaaaagcgcagcctgaccttcagcccgcccagcgtttcgctacgcagcagctgcggatggctgcggtgcaggcgcgcaatatcgctgaccagcgccagtccgagcccggcgccggggttgtcacccacgttttccagacgatggaacggcatgagcgcctgctgaatctgcgcatcatcgatcccgggcccgctgtcttcgacctccagcagcaccgcctctccgtcacgatgcaggctgaccgtgacgataccgccctgcggcgtatagcgaatcgcgttatccagcagattcgcgcacagctcgctcaacagcacaccatcgccggcaatggtcaccgtcgagggttccccctcatagccgagatcgatagccttgctccgcgcctgctgaagacgcgaaaagcagctgttgtggacgatctcatgcaggtccaccggcgggaacgcgtgctcgccctgctctttccgtttgatggtagccagctgcagcaggcgttcggtaagcagaatcgtactgtcaagcgtgccgctcatcgcctccaggctctctcgccatagccggggatcgccgctcgccagcgccactgaggcctgcgttttcaacaccgctaaaggcgttttgagctgatgcgacgcgtcggcgctaaagcgctcctggcgggagatcatcacccgtaaccggtcgatatagcggttaaaggccacgatcagcagacgggtttccgaccacggcagcagctccggcagcggcgtcagcaggccgggttcgcgccgcaccatgagcgccgaaagccggcgcatcggccgcagcacgcggcgcagcagccagccggtgagcaccagcgtcaacagcactaatagcccctgcgagatccatgatgaaaacagcagctgtcccgccagccagcgccgcgactgcagcgtttcggcgatgtagatttccgccatgccgacaacgccgccttcgttaaccggctgcagcaggcgcgccacgcgaatggcctgaccgcgatattcagtatgataaaaccacgccagcgccggatagagctcggttcgagaggtcgatggcggcatcgatggcaggtcgtcaaaaccggaaatcacccgcttctcgggatcgagcaccttatagtacagccgatcgttcatattcagctcgaagctgtccagaaccacccaggggacattcacctccagcctaccgcggcgaaccaccaggcgttccgccaccgtgcgggcggatgaaagcagcgtgcgatcgtaagcctgggttgccgcctgcagagcgctgacgtagctattgaacgccgacagcccccatagcaaaaccagcggcaggccgagaaacagcaacagttgagcgaataacgactgcggtttaccccacctcatgagcgagctccagcacgtagcccaggccacgcagggtcacgatacgcacgttgctctcctgaagtttcttacgcagacgatggatatacagctcaatgctttccgggctgacgtcatcgttcaggctgaaaacctgttcaaacagctgctggcgcgacaccggccgcgtacggcgaaacatcagcaccgtcagcagcgcctgctcgcgcggcgtcaacgacagcgtttgtccgcagagtaaaaaatagccttcatcgcgatattccagcgcgccgatctgctgaacctcatgcacctggccttcgctacgccgcagcagcgcgcgcagcctcgcatccagctcttcaagctcaaaaggcttcggcaaatagtcatcggcgccgacgttcagccctttaacccgatccgccaccgcgctgcgggcggtgagtagcaagacgggaagggtctgcccgcgctttcgcaggcgctgcaccacctccagaccgtccagtcccggcatgccaatatccagcaccgccagcgcatatttttcgctttgcagcagatgatcggccgcgcgaccatccaatacgcagtccacggcaaacccgccctgcaccagcgctttctccagccagtgagccagctcacggttatcttctgccagtaagagacgcatatcacatcctgaaaagttgctgccgcattgaaagggaaatgaaaggtaattgttttaacaatcacgcaaccgaatagccacatgccggttcacataattaaaaaaacgtctcctgtatctgactgaggaagcttatgaatatgccattcctgcgccgtgctggcgccattgcattatgccttttaaccgcctctgccctggccgccgaggcgccttcccgtaccgaatgtatcgcgcccgccaagcccggcggcggcttcgacctcacctgcaagctgatccaggtcagcctgatggaaaccggcgccatcgaaaaaccgatgcgcgtcacctacatgcccggcggcgtaggcgctgtggcctacaacgcgatcgtcgcccagcgccccggcgaacccggtaccgtagttgccttctccggcggctcgctgctcaacctggcgcagggcaagtttggccgctacggcgtggatgatgtgcgctggctggccagcgtcggcaccgattacggcatgatcgcagtccgcgccgactcgccgtggaaagacctgccgtcgtttatggcggcgatggaaaaaaatcccgccagtatcgtcatcggcgccggcgcctccattggtagccaggactggatgaaagcagcgctgctggcgcaaaaagccaacgtcgatccgcacaaaatgcgctacgtggcgtttgagggcggcggcgaaccggtcaccgcgctgctgggcaatcacgtacaggcggtctccggcgatctcagcgaaatggtgccttatctccagggcaataaaatccgcgtgctggcggtgttcgctaacgaaaggctgccgggtgccctcgccgatgtccccaccgccaaagagcagggctatgacctggtctggccgattattcgcggcttcttcgtgggtccgaaagtcagcgacgccgactatcagtggtgggtggatgagttcacgaaattgcagcagaccgacgcgttcaaaaagcagcgcgagctgcgcggcctgttcgaattcaatatgaacggtaaggaactggacgcctacgttaaacaacaggtggaagcgtatcgcctgcaggcgaaatcctttggcctggccaaataatttacggaggttgcgatgagcgatcgtatttttgccggagtgtggctgctgctctgcgcgggtggaatgtttatcgcctggcaaattcacagcgaatacgcctatgaacccgtcggcccacgccctttcccggtcggcattatcggcctgatgctggcgtgctctgtcttgctgcttctgcgtcggcccgacgccatcacgtggcccgggcgccggattttacaacgtctattaaccatggtggttgcgctggggatctatgcgtggggttttgaatggctgggttttcctctggccaccgcgctgctgaccgccgtgtttggcctgctgtttggcgccaccctgcccgccgccggggtagccggcgtcgcgatgggcatcgcgctgtggtacgtctttgacgccctgcttgatgtcaccctgccgctcggcgtttggttgagttaacggagaaggttatggatatctggatttatttatcgcagggcttcgccgttgccatgacgccgggcaacctgaccatcgcgctaattggctgctttgttggtactatcgtcggtctcctgccgggtctgggcccgattaacggtgtcgcgatcttactgccgctggcctttgctctgcacctgcccgcggaatcagcgctaatcctgctggctacggtctatattggttgtgaatacggcgggcgcatttcgtctatcctgcttaacgtacccggcgatgccgccgccattatgaccgctctcgacggttatccgatggcgcagcagggacgcggcggcgtagcgctgtcgatctctgccgtgagctcctttgttggttcaacgatcgctatcggcgggatcatcctgttcgccccggtgctggcgcagtggtcgctggcgttcggcccggcggaatatttcgccctgatgatttttgccatcgcctgccttggcagcatgatggcggaaaatccgctgaagtcgtttctcgccgcgctaatcggtttggggctggcgacggtgggcgttgatgccaataccggcgtgtaccgcttcacgttcgacagcgttcatctttccgacggcgtgcagtttatcgtggtggtgattggtctcttttcggtttcggagattttgctgatgctggagagcaccagcggcggacagaagctggtacggaaaaccggacgcatgctgtttaacgccaaagaggcgggccagtgcgtgggcgcgaccctgcgctcatcggtggtgggtttctttgtcggcattctgccgggcgcaggggcgaccattgccagcgccatcacctatatgaccgagaaaaagctcagcggcaatagcgctaccttcgggaagggcgatattcgcggcgtcgcggcgccggaagcggcgaataacgcctccgcctgcggctcgtttattccgatgctcacgctcggcgttcccggctccgggactaccgcggtgatgatgggcgccctcaccctctacaacatcacgccgggaccggcaatgtttaccgaacagccggatatcgtctgggggttaattgccgcgctgctcatcgccaacgtgatgctgctgattatgaacattccgctgatcggcctgttcacccgcatgctgacgattccgctatggtttctggccccggccatcgccgccgtgtccgcggtcggcgtctacgcggtgcacagcaccaccttcgacctgctgttgatggttgggctgggcgtgctgggctacattatgcgtaagatgcacttcccgatgtcgccgctgatcttagggtttgtgctgggagagatgctggagcagaacctgcgccgcgcgctgtccatcagcaacggcaacgtggcgattctgtggcaaagcggcgtaacgaaaacgcttctgtttctggccatcgcggtgattgttgtccccccgctgctgcggtactggcggaagcgccagcttaatacgcagggcgacctgccctcttcctgatgctcaacgtcattggcggtcgctcagcgccgccaatgacggtatacgttgaatttccaccacatctgcctgatagttatcgttttaactttctggtgatccgttatgaccgtcgccgcatcccgttcggggttaacattcgccgcgttggcgctggccctgatgcttgtttacaccggtatcagcgcaggggataagctcacctggctgatggaagtgacgccggtgattatcatcgttccgcttttgctggccacgcgctcgcgctatccgctgacgccgctgctttacacgctgattttcttccatgccatcattttgatggtcggcggtatgtacacctacgcgaaagtgcccatcggctttgacgtacaggcgtggctgggactgagccgtaacccctatgacaagctggggcactttttccaggggctggtgccggcgctggcggcgcgggagattctgctgcgcggcggctacgttcacgggcgtaaaatgctcggtttcctggtctgctgtattgcgctggcgattagcgccgtctatgaactgatcgaatggtgggcggcgctggcgctgggacagggcgcggatgagtttctcggcacccagggcgatccctgggatacccagtcggatatgttttgcgccctgctcggcgcgctgaccaccgttttagcgctgggccgctggcatacgaagcagctactgaccgtccagcgcgtctgagtcgggcatcgcctgctggttgacccagtcacgtagcgcccggcgggaaattttaattccgccggttttcagcgattcaggcagccgcagccagcgcaccggctgctgaaaccgcgccagcttatcggcgcaccagcccgccagcgcggacgggtcgtcattctcgccgcactccaccaccgccaccggccgctggccaaactccgcatcatcctgcggcacgatgaaaacttgcgtaatccacggatgagcgccaatcacccgctccacttcttccggctgaataccttctccgccgctaaaaaagaggttgtccactcgtccgaggatagtcagcctgccgtgctccagccggccccgatcgcgagtggcgaaccagccgtcggcattagcgagggggacaatttgcccatcgcgccagtagcctgcggcgatgctgtccgaccgcagccacacttcaccatcgacaatccgcacttcgcgccccggcagcggctgcccgacatccgccaggccgtccgcctccttggcgcataccgtggaggcaaactcggtgaggccgtagccgcaccagcagcgaataccgcgcttaccggcctgctcggttagcgccaccgggatcgccgcgccgccgagcagaaccgctttcaacgacacctcggcgtcgccgctgagcaggcgccagagctgggtcggcaccagagaggcatgggtacagccgcgtaacgcctgttccagcggctgcttgtcgcgtaccgtcaggcctgcgccagctaacaaccagcgccagagaatcccctggccggaaacgtgaaacagcggtagcgacagcagccagtcgtcctgcggcgcaaagggtatcatcgccagcacgccctctgcgctggcaagatgggcgcgaaaagcgtgcaccgccgctttcggtagtcccgtcgaccccgaggttggtgtcatggacgcgatacgatcttctcgccaggcgaccgcgtgcacgccgtcgccggcgcgcaacgctaatggattaagcgccaccggaaggtcgccgccgtttagcaccagcgcgtggcgcagtcccagagacggcagcagttccgccaacagaggagcaggcagctgcggattcagcggcaggacgcgcgcgccacactgcaggagggccagccacgccagcagagcatcgggctggttgtaagcgcgaagcagcacgccatcgccgtcgcgaacgccctgggcgtggaatccccccgccagcgcatcaatttgcgcgcacagttcccgccagcttagccgccgctcgttcaggcgcagcgcctgagcctcttctcgcagccgccgccagtggcgccagggccagtcgctaaaggtcacagcagcggctccagctcatcaacgtgcagacacggcagctcgctttccggccaacggcgcaccagctgggcacgcatcaggctcagcgtgtccagaccggggatcgtgtccggggtcagccaggcggcgattcgcgccagctgcgtcaggccaaggctcgactcaatggcggaactgatgaccgccgtcagccccagggcatgcgcctgcgccacctgctgccgcactttttgcagactgccggtcaacgtcggtttaatcaccaccgcccgcagccccggctcggcggaaaaggtaaagtccgcctcgcgcaggctctcatcccaggcgatagcgatacccgtttgttgggcaaaagcgcgcgaatcatcgcggtttttacagggttcttcgagaaaggcgatgcggctgcgatagtgtggattcacgtatttggcaaactgctgcgctttcagcggcgtccaggcgcgattagcgtcgaggcgtagcgtcagatcgggaatcgcctccagcagcaggttgaccaccatgccgtcgcgcaccgcctcatacaggccgactttgaccttggcgactttttcgccgggcatcagcgaaagcctggcgaacagctcgtccggatcgccggcgcagagcggcgccgcacgatagtccgccgcctgcggcagctcgccgcacagttccgccagtgcgcagctcgccccgaaagccgccgacggcggcgttggcaacgcgccctcttcgccatcgcgccaggcgctcgcccacgccagcagcgcagcctgcgcctcatccagcgtttccaggctgaatccgggcaggggagatatttccccccagccttcgcgctcgccgtcgcgcaggcgcagaagcaaaccatcgcgggtttttaaccgccgttcacgcagcaccactcccgcgtccatcggtagctgccagcggtagacctgcgcctgccgcattacggattccgtttaaatttgctgaagtccggctggcgcttctgattgaaagcgttgcgcccttcctgaccctcttcggtcatgtaaaacagcatggtggcgttacccgccagctcctgcagtcccgcctggccgtcgcagtcggcgttcagcgccgccttcaggcagcgcagcgccatcgggctgttctgcagcatttcccggcaccagcgcacggtctctttttccaggtccgccagcggcaccaccgtattcaccagccccatatccagcgcctgctgcgcgtcgtactggcggcacaggaaccagatctcacgggcttttttctgcccgacgatgcgcgccatataggaggcgccccagccgccgtcgaaagagccgactttcgggccggtctggccgaagatggcgttttccgccgcgatagtcagatcgcacatcatatgcaggacgtggccgccgccgatggagtaccccgccaccatcgccaccaccggtttcgggcaagtgcggatctggcgctgaaaatcgagaacgttgaggtgatgaacgccggaatcatcctggtagccgccgtagtcgccgcggactttctgatcgccgccggcgcaaaacgctttatcgccttcaccggtcagaacgatgacgccaatattgtcgtcatagcgggcatccgccagcgcctgaatcatctctttgacggtcagcgggcggaaagcgttgcgtacctgcgggcggttgatagtaattttggcaatcccgtccgccgatttttggtaacgaatgtcggtgtagccttcggagcagtcctgccattcaatcggggcgtaaagcatggcttcatcaagagagatcataaagtgtccttcggttaactcgctaaaaactgcgccagacaagccacgacagcatcggggttttcccgatgcgcgttgtgtccggcatgattaatcacgtgcgcggtggcggagagttcacccgcgatggcgcgaaacttgccgtcgcgttctccgcaaagataatgaaaagggaaatcgcgcgcccgtaacgacgcgcgcagatcgggttgttccgccagcgagctggcctgcagcatcgccgccaacgctccgccgttattgcggctgcgtagcgcaaccagcgccgcccgctgcgctgcgtccagggaagcgaagaccggctgctgataccagtcggcaaagacctgggtcagcggctcgcggcgaaagcgttcagcccaggcggcatcgctgcgccggcgcagcctacgctggttatcatcccccaggcccggatgccccccctcgacgaccagcccgcagagcccttcgcgcggctggctgacatagaacatcgccacccgtccgccgagggagtatcccaccagccagtacttaagtatgttgtaactattaagcgtattcttaatcaactcgctgacatcggcaaaatggtttacggcgatatgcgccgatccgccgtggccaggcaggtcaatatagagacgcggatacgcgccaaacgcctgccccaccgtgcgccactcatgactatccccggcaaaaccgtgcaaaaagaccagccagggatagcccggcaggccgctttcagccaccgcgtgcagcgtcatagctgactcacctgcgccagcagctgctgaagcgtttgcgtaccgtcggtttcattaaccgccagttcaatcaacgtcgcgccgggtcctcgccaggcaacgtccagcgcctgctccagctcattccagtccgcagggcgatggtaagtcagattgaacatcgccgccgcgtgcgcgaaatggatattctgcggcatcagatagaactggctgcgctgctcctgcggcgtgggcagcagggaaaaaatctgcccgccgttattgttgacgacaatcagcaccagcggcgcggaggcctgatgcagcagggccagcgagttgagatcgtaaagcgccgaaagatcgccgacgatagccagcgtcggacgcgcgctggcgcgctgtaccccggccgccgtcgccagcaggccgtctattccgctggccccgcgattgctgtagaccgggtaacctaccggtagctgcgacagcgcgtcaattaagcgcaccaccaggctgttgccgacaaacagctggccctgttccggcagatagcgccggattcgctgcgccagctgggcttcgccgaaatcctcgctgctggcgaccgccgcctgccatgcctggcgcgaaagctcgggaatgacggtgggccacggctgtcgtttttccgccggatgctgttcaagccagcggtcgatggcgcacaccagccggcgaccgcgatgctgggcgggatccagtcgccccggcaaattatccaccagccagtactcttcgggttcgcaggtggcctgccactgcaaaacgcgtttgctggtcaggctgctgcccagttgaacaacgatttgcgcctgcgccagttcactgaccgccttgccgttgcccagccacaggtcggcgcaggggagcggctgcccggtttgcgagagcacatcgccaatcagcggccagccgagggttttcgcccactcggccaccttgacgccctcttccgcgctcatccgtccggcgaccaccacgccgcgtttctgccgccagaaaaaccagtcgcgctgcttttcactttccagatgcagagagtgacgcagccagggcttgtcgctctgccaccagtcgccgagctgctgctgccactcggcgccggtgtcgtccatatcgccatacagcggttcggcaaacgggcagttaatatgaacgccgccgcagtgtagcgcgccgagcgcctggtcgagggtcgagaccagccagcgggcggagatatcctgcgacggacgcggcagggatagcgtctgcgacgggtgcgaagcaaacatgcccggctggcgaatcgcctgattcgcgccgcagtcaatcagctccggcggccggtcggcggtcagtaaaatgagtttttcaccggtcagcccggcttcaatcagcgccggatagaggttagccgtcgcggtaccggaggtcacaatcaccgccaccggctgaccgctggctttcgccagccctaacgccagatggccgaggccgcgttcgtcaaagtgggtatggtgaatcaatgcgcggttttccgccgccgccagggttaaaggtgtcgagcgcgatccgggcgcaatgcagatatgctgcacgccgtggcgcgtcaatgcttcaaggatcaccgccgcccagcgtcggttaaatgcgcttacagacatgaatttgtccagtatcaaatattgaggctaagtatagataaagcaaactgttgccgttttgatatgcatcgttttctctatacttctgacagcagtaacgaacgcaatcccgcggctttattttcaatttcctgccactcctgctccgggtcggaaccgctgacgatccccgcaccggcgtagagtctgagcgtacgctgttcgattttcgccgaacgcagagaaacgcaaaattcgctttgcgccagcgacagatagccggcggagcctgcataccagccgcgggtaaaaagctcattacgggtgataaaatccagcgcaacccggcgcggtaaaccagcaaccgccgccgtgggctggagctgatgaaggcagcgggcatcgtcaggcttctccagctcggcccaaatacagcgccggagatgctgtactttccgcaaacggacaatctgcggcggcaggacttccagcgcgcgggtctccccttgcatccgctgacagatatcctccaccaccagcatattttcgcgctggttcttatcgtcggccatcagccagttacccaaacgctgcgcctggcgatcgtccgcatgactggcaacggttcccgccagcgcttcggtacgcagcagcgctccgcgacgccgccacagccgttccggcgtagagcccataaaggcctcttgcgcgttaaagaccatcaggaagtggaagcagttaaggttgctgcggcggctggccgccataatcgctccggcgtttaacggagcggcgaagtgcaaatcggtggcgcgagccagcaccactttatccatctcccccgccgctatcgcctgcgtcgcctgcgcaatcagctctctccactgcggataagccgggaaatgctgttcgctcagcagagagggcatcgcggtagcctgcgcctgtttcgccaccagcgaatcgagaaattcacgtgccgcacgggcatcgtcacggagcgaggtctcgctatataacaccaggcgtagcgtggcgctgccgcccagccgacgccactccagcctcggcaagatcaacagaccctgctgaggatgaaaggcgttaaggccgcaaattcgcaaatcttcacgcccctgctggcgcaaaaaagcgtgcgcctgctcaagggaagcaaagatttgcaccgcccccagcgcggccagctcttcatcgccgctgcgctgctgccagtagaactgcggccactgcggctgatgcgtgcaccacagaaggggatcaaatgcgtcattcagcgcgaaggggacatcgaaaattcgcgtgccgggcaagggcgggaacgcttcatccaggcagcgatacaggctttccagcgcggtggatacagacagcacgcaaacctccacggagtaaaaaccccacattatacggggtactactgaggaatagcagtacccacgatgagggagcggtttttaattagcgcggcggttagtgggtggcgatttcgaacgccatgccgatatggtcgatgccgtcctcgtcgtaaacctcggtcaccggcacaaaaccgaagctggcgtagaatttttgcaggtgcgcctgggcgccaagatagatagccttttgcggccagtgttgccggcagctggccagcgcctgttccatcagctgatagcccagcttctcgccgcgtaccgcctggctgacaatcacccggccaatcaccaccggttcaaactcatcatcgctcttgagaatgcgcgcgtaggctaccagctcatcgccgcgccagccgagaagatggcgattctcccccaccagatcgtcgccgtcgacgtcctgataggcgcaggtttgttcgacaacgaacaccgcacagcgtaatttcagcacggcgtagagctgtgggacggtcagttcaccgtggtgaagatcctgccatgtaatcatctgcgcttccttaattaattttaaccctaaataattcaagtggcatgaaggcggccagcgagcgaatcccctggagcttacatgagtaagtgactggggtgaacgagtgcagccaacacacatgcaacttgaagtatgacgggtatactttgttttttgactcacgccctgaggacactggacgatggaattactctttttggggacatccgctggcgtgcctacccgtacgcgtaatatgacgtcgatagtgctgaatttgcaacagccaacaatggctgagatgtggctgttcgactgcggggagggaactcagcatcagtttctgcgcaccccttaccatcccggcaagctgaataagatttttattacgcatttacatggcgatcatctcttcggtctccccggcctgctgtgcagccgctcgatgcagggtaattctctgccgctgacgctgtacggaccgaaaggacttaaagcgttcgtggaaaccgcgctgcgcctcagcggttcctggaccgattacccgctgacgattatcgaagtcgggccgggactggtgctcgatgaagccggcttccgggtcaccgcctggccgctcaaccacccggtcgaatgctacggctatcgtatcgaacagcatgataagccgggcacccttgacgccgcgcagcttatcgccgaaggcgtgcctcccggtccgttatttcagcgcttaaaacagggattaacggttgagctggaagatggaaggcggattgacggcagccgctaccttggcccggcaacgccgggtaagaagctggctattttcggcgataccgccccctgcgaggcggcgcgggagctggcctgcggcgtggatgtcatggttcacgaggtgacgctcgaacaggcgatggcggaaaaagcgaacagccgcgggcattcaaccagccagcaaacggcggcgctggcgcgcgacgcgggcgtcggcacgcttatcgccacccactttagctctcgctatgacgctgaaggctgccagcgtctgctggcagagtgcagagagatatttccgtctaccgtgctggcagaagatttcatggcgtatagcgtagaataaaaaagcggcgtaccgcggcagagagacgccgcgaatacgccagccattactcttcagcgtagctgttataacgcagaatagattttaaattgcgatagcccaggtaatcctggatcgagtcgtcatcaattcctttttttcccagctcatagccgcacgcgtggcgcagcatcctgggatgaatattttgcttcagcttcgccagctcgcagcactcgcgaataatttgataaaaacgctggcgcgtcatctgattgccccgggaagagataaacagcaaatcgttatgagccgggtaacactctctggccagtagccagcgctgtaatgagataatttctttgggttgtaagggatgatacccagagataccgtgacgcgcccggcgaatataaacccgttttcgcgacaggtcgacatcccgcaaggtcaaggcggtaatttcgttaatccgacaaccgtgcaaaaaacacatctggatcatgcagctatttctttccgggtgcgcacaataatgtgcagcaagtaccagacgctcaacgtccttgacgctaagatattccgtatctacctgcatacgttattccttttcatccatttgactataaaattactgataggtaaatgtcagctgtacaatagactcaaatttacccaccgttgctccaccccgggttgaatataaacgggcagccagcgggaatacgcctttcccggtactgccgtcgatagcaatactcatctggtcctgatttttataaagagtagagtgatcgctactggtgatttgcagtgcgatattctgcgccgcatcgctggcggccatattggcaaaatgtctggcatcatcaacgtcgataacgccgtcaaattttaccgttgcttttgttgtccccgccgggcagttttcgacattcaggtaaaaggatttccactctgaagcgttgccggccgtttgaaagtcaatattcaggagcgggccaaaattaacctcttgatacttcgtgtcggtactgacgtcacaggggagataataaatattgccggtaatattcaaagggatcccgcccgaggatgaaaaaacaggcagcaataatgccagccatagcgcctttttcattatctactcctgctattcaatttctgcctgaatggttgccgtagcggtaaagcctccgccgctgggtaaattcccggtggtattaatcggataaattttcatagtggtgtccccggtctgactcgggtaattaaaattgaccggcagcagacctgaaatgaccggtattttgacgccggtaatattttcaatacgcaccgcaatgtcgcgattggtggtcgccagcgcagtgctatcgttagtatccgccatcccctggaacgacagcgcgatttttaccccggcggaaatattggtacaggccacagtcatattaacaacatgcggaacgaagtccttcggcatctggcccgcggttttaaaatggttggcggcaatatcctcaaaatcaatattaatcgctttaccggtattaatctcacaggactgtggaaccgttaccgacccgctcattgaaatttgcgtcagggggataccactgtagctgccggtttttcgcgtcccgtagacactcaggataactgtcggagggatcgtcacctggcctacaaaaggccgggtaaaataaagcgaaatatatcccagtgaccctgtatcaaaaatggcgccgccgggattacaggcaaaaccttgattattctgattactcttatcctcaatcggcgtaggaatatatttattaacacccccggcaataaataactcggtggcaatttccaggtatttatttagctggtaataatttaatccattgcggctttgcgtcgcggtaaggcctggcaccgtggctttaaaatacgtcaccccgctggcgctatcacaatcacactttgccttgtaggttcccccggtactccagcggtacaaacggggaaactccattccggcctgattttgtgagggattagtaaagctttcaataaatgaaaagctatcctgaaaaggcgccccgccattaccggtattctgacaccacccggttgccgccatcgcctgcggcgcgatcgccagcaccgccaggcccgctaatattccccatgaaaatcgtttcattgtctctgcatcctttcgattatcggcattgcgcctgggccacaataatgccggtaagttcttttgctgacggcagcgcatagtggatctggcagcgttcttgcgccccggagccccacttcacgttgagtacgccgttagattccagtccggtcaggtagacctgcccgccatcgccaacgataaacgcctgctcagaggatgccgccccggggacgctgaccatggctccgaaaggcaggggttgcccgttctcctggcgtaccgtcatcagtacccggttacccacgctggtggcataatttgcgcgaaccaccgccccacgggttggtacgaccgtctgcgtcgccaactcaaggtcgacatcgtccggcatcgtcgtggtatcgagcgtcaggatattcttacgatacggcgaggcgtaaggcactacggtatagcctcgccagtcggttctgacccctgtctggctattcacgccgacgccggcggcgccgggcgccttgatgagagcgacggtttcgccgaaaggctggcccagcgtcaggccgttttcatgtaccagcgctccgccgcgcagggcgtagttcagccgatggctgtatttatcatggctgtagccgccggtaagttcagcataggttgcacgccagtccgcattgacgctgccgctctcccctcttccctggctggtgtagccttcctgcacgctccagctcaggttattacgctccagcaaggtgccggagaggcccagattgttgctggtggagccatttttgctgctgttcagggagtagttggcataaaccggcttcggtagccattcccccaaaggcacgctgatgctcagtgcaaagaggtgatcttcgtcattacgcttaccggtgttctggtcggtagtattgcggttatagctgtagttcatgctatagctgatgccgcgccagctgttgttgtatccgacgcccactgactccatggtgcggctggtattccagtagtcctcgcggatatagctcagcgacagcgatcccatttcttcgccaaggctttggctgatcgttacctccccgcggttgcgccgccgttcaatagaaggcgtgtagttgtcatcccgataggtatccagcacttcctgcatatcccagtaaccgctggtcgcatagcgatagcctgccaggcttacgttagttcccagacccgggagatctttgctgtaacggagacgtaccgactgcccgctctctttatctttatcctgtcgggtcgaccaggcctggatgatatcggtcgatacggcgcccagttcaccgaggtttttccccattcccagcgccaccgactgatatttactgctaaactggccgccgccgtacagggttaacccccagggcaagccgtaaattgccgtcgcctgcgtgaggggcgtttcgtcaatgctgttgtcataggcgcgatacacgccggaggtcacgctatatttcagacgcccttcgcgctgcaggacagggagagaagcgtaaggtacgatcaggttctgctcgctgccgtccgcctctttgatggtgacggctaaatcacccgagccgccggtcgggtacatatcggtaatttcaaaagcgccaggcgcgacgtaggtctggtaaatctcatagccgttctggcgaataatgacctgagcattagtgcgcgcaatcccgcgaacgacgggcgcgtagccgcgcaggctttccggcagcatatcgtcatcggaagccagcatcgccccgcggaagggaacgccctcaaaaacgtcggcgtccgtgctgctatcgcccagcgtcatcaccccctgtatcgatttgatgttgcgctgcgcataggtataaaccgtgtcccaactattactggactctcccccgctgctgctgcgcgaccaggtcgtgtagttacgtaaacgccacggcccgacgttgataccggggcgcaggttaacgtattggttatcgctgtccggcgcatcgttctgacgtgaccagttatttgccccgctaaaggagtaattcagcaggatcgccggcaccccctcatcccactgtttcggatccacccagccgcgggcggcgctggctaccgccgcctgcgggaagctcaatagcaggcgctgctggctgaagcgaaaatcggattttgcctgcggtatcacgctgatatccgcgcagccgggcgttctgcggcccagctctggaaattgggagacgcgcacgccccattcggccagatcgtctaccgtcaggcaaggctgtaattccgttattcctggtcctttgctctgctgaaaaaccacatcgcgggtgtccataaaaacgttattaagataaatatctacccggtaggtccccggcagctgtccgccagcctgctcgtaagcggataaatccctgacgcccgtatgagggccgtccatttccaacagggccgggttaaaaacctcccgcgccaggacatcttcacacagcggtagcagcgcaacggccagagcgccggctatccggttaagccgccatttattatgattatttttcattttccctggaactccctggcctgaaagcctttacaaattcgcgtggtgcagcgcgccggtaccgccataatcgttaatcagtttccactgcaaagcgcccgcgctgacgcccggcagttgaaagcgcgccgtttcccccggccccacccaattggcctctttaacttcggcgccccccactttgacctcggcaaaattcatataaaaggcggtgggattcatgacctgtagcgtattgccgctgcgcgtccagcgaagctgctccgtcaccatctccggcgttccctcaacggatttaggtcgataaattaatttgatgcgcgttttgatagcgatctgtagagtattggcgccggctttagcctgcgaggagggaatcgctttaatgttcatccagaacatactttctttattttccggtaagccgccgctgtaaattacccgcagtcgggtttgctgctcgccctcaaggcgaaataaaggcggcgttaacagaaaaggggctgcgcccttattactttcaacccagctttgaatgagataaggcgtagcatcattattggttacgctcagtgaggactcttttttaccgccgggataaatcagacgagtaccgccggtcaccacgcccgcatgcgccgcagcgccgaccaacagccatccagctattagcactttcaggtatttttgcatctccagctccctggaaaagcgagccacatagggctcgctaacactgtcatatagacggaaaattagttatagctgatggtaaagttggctgtaccgtcagctttacccgcaacgatagtgctttcagtctggatataacggacgcggaacggcagatcgatattgccggtagcggggatggtcaggctggcagaacgcgtatagagcggcagcgtcgcgttgctgctggcgtcaaccagctgcagggccacgccttcggcaacggcaggatcggtacccgctccggtcagctgcagtttatcattatcaccgttgacgttagcgccggagaacagtaccgatgctttggtgacggtagtcgggcagttttccagtttaatcgcgaaattctgttcagccgcagtagaccccgtaccgctaaacgcggtcttggcaatctgccccatctgaacttccagcgggttggacaggtcgttcaccacgtcgcagcccgcatcgatgatatcgccgataaacttcacctgaccgtcatccgccagcgcagcaccagagaacgccgcgcaaccggcgacaacagcagcaagtaatgtttttttcatgatttatccttttcaatgcagtcgatgcattaacttataagcgcaataccctgcgcatccttttatttacgtttgatattaataacgcaacaaaacattgacccatgaaatggatataatattttgaagtggtcattatgtatcaatatgaccacttcaattaattagaatataaattgccagggaaggcgtttttgatttcatatttatcaggaaaaatcccaataaacacgataaaaagctaaagaatgagaggcggaacaaaccatacataaagccaattaaaacaattaaaaaataaatgacacctatacttaatataactatatgaaaataatagtaaaaaatattgttaatcataaattgacattgttactacctgtggatagcataggagtcagtttgatacaaaatgactattccgtttaccaaacttctctaaacctcgcatcattactggctgtatagataaccgtgtgctgaatattccgatgtcccagaaagtcctgaattaatcgcgtatccacccccttattagccagcgcgaaaccgcatgcgtggcgcagcatatgcggatgcgcgttaatttccagctgggcgacgaggctcaggttcttcatcatctggtatattctctgccgggataaaggctggccatttcgtgacagaaagagccagccagaattatttccgggataattattacgcacgcgcagccattcgttgagtacttttacctcttgtttataaataggatgagtggttgaaaagccgttcttcagtcgacgaatataaatgaccccgctttgaatatcgatatcagagagcttccagtgacgaatttcgctcactcgacaaccatgattaaaacacatccacagtaaacagacatcgcgctccgggtttgctccccgcctggccgcttcaaccaaacgctgaacctccccgacagtcaaatgcttacgtcttgttttcattcactttctccatctacaaaacacaatagcgtgcgtagtaataatagtacggaaaataagaggatgagtggaaacgtaaagtgagattaatatgataaaaagcatgaataatacgaaaaagagtaaagaaagcgcctggcgcctttgcgtagataaaaaaaggaccgccgaagcgatccttttctctggctaaagatagcattacatcagcggcgtagccaattgtacgatgctgatgagcggctgcggccaaacgcccagcaccagcaccagcagcgcggagatgagcaccacgatgcctccggcactgtactgccagttagacggcgcatcgcgattcagtttctccggcgcgctcagatagaggctcaccgccacgcgcaggtagtagtagaggccaatcgctgaacccaccactaccgcgccgaccagccaccacaggtgcgcatgcacgcccaccgccagcacgtagaacttaccgataaagcccagcgtcatcggaataccggcaagagacagcatcatcaccgtcattaccgccgacagaatcggacgatgccagaacaggccgcggtaggagtagagcgaatcggcatccgggccgcggtacgggctggacatcaggctcaccacgccgaacgcgccgaggctgctgaacaggtaccctgccagataaacgcccaccgcttccatcgacatctcaccgctctgcagagcaatcagcgccaccagcagatagccaaggtgagaaatggaagagtagccgagcagacgtttaatattggtctggctcagggccatcaggttcccgaagataatcgaagcaaaggcgatcaggcccagcaccacgcgtaccgcctcgctgtcgcccaccggcatatagaggaacaggcgcatgaccacgccaaagatggcgattttactggcggtcgccaggaaggtggaaaccggagcaggcgcgccctggtatacgtccggcgtccacagatggaacggcaccagcgacagcttaaagccgagaccgacaatcatcagaccgagaccagccagcagcagcggctcgtgcagcataccatccgtcaggctcttaccgagcgcaaggaaggagaggttaccggagttggcatacaccagcgccataccgaacagcaggaacgaagaggcaacggcggacagaatcgtatatttgatactggcttccagcgaacgtttctggcggaaggcgtagcccaccaggccgaacagcggcagcgaaatcagttcgatgccgaggaacagcgccgccagatggttagcgcccgccagcagaatgccgcccagcgcggcgatcagcaccagaagatagaactcttctttgttgtccttgtaaccctcaagccacgggtaggcgaaagtacaggtggcgaggctcgccagcagcaccagcccggtatagagcatcgcgtaaccgtcaacgcgaatcagcggcgtgacgtccatcgctccgttctgacccacgaaccagagtgatatcagcgcggcgttcaggccgagaaccgacagcgtggcattgaggaaatgattgcgtcgccacgcaatggagagcatcacaaccaccaccgtcaagccgacgatcagcagcggtagcagtgcgatcagttgttgtggagttattgtcatggcgaattacggccttgtagtagaaacagaattaacaaaccactgctgaatgttgctcatcgcagagtgcgaggtgtccagaatcggctgcgggaagaagcccagcagcaccagcagaacgaccagcagcaggatgatcgacagttcacgcagggacattcccggcaacgctttcgcggcgatttcgctttttgctttaccaaagtacgcgcgatgcagcatcgacagcgagtacacggaagcgaacaccagaccaaaggtcgaaataacggtaatcaccggcacggttttatagctgccgaacagaatcataaattcaccgacgaagttaccggtacccggcatcccgagggtcgcgaccgcaaaaaacatcgacagcgcgggtagccacttgatcttgctccacagaccgcccatctgacgcatatcgcgcgtatgcagtctctcgtaaagctgaccgcaaagaataaacaggccggcagcggacagaccgtgagcaatcatctgaatcaccgcgccctgataagccagctggctgccggtgtagatagcaatcagcacgaagcccatgtgggaaacggaggtgtatgcaatcagacgcttgatatcgtactggctaaaggccatccacgcgccgtagaagataccgatgacgcccagccacatcgcgatgggggcaaattcggcggaagcgttcggaaacagcggcagcgcaaaacgcagcaggccgtaggccgcggttttcaacaggatccccgcgaggtcaacggaacccgcggtcggcgcctgagagtgcgcatccggcagccagccgtgcagcggaaccaccggcatttttaccgcgaaagcgataaagaagcccagcatcagcaggtattccacgccgtgggacatcggcgtcttcagcagctcttcatagttgaaggtccatacgccggtagcgttgaagtgcacaaacgccagcgccaggatggatatcagcatcaccaggccgctcgcctgggtataaatgaagaacttggttgccgccgtgatacgcgttttaccgtcggaagccttatggccccacagcgcgatcaggaagtacatcggcaccagcatcatttcccagaagaagaagaacaggaacaggtcgatagccaggaatacgccgatcacgccgcccaggatccacatcaggttaagatggaaaaaaccctgatatttctcgatttcgcgccatgaacagagcaccgccagcacgcccagcagcccggtcagcaccaccatcagcagcgacagaccgtcgatagccagatgaatgctaatcccgaatcgcgggatccacggcatcacgaattccgactgccactgcggaataccggtagattgcgtgagagaatagccgccctgcatccacaactgcaggccaagcagaaacgtcaatcccatagtgatcagcgcgatccagcgcggcatcttcacgccaaagcgttcagtctgccagcacaggaagccgccgatgaagggaattaatattagccagggtaataacatggcgatctttattccttgttaaagtcccgttcaggaccgattttcaacgaattctcacagaaaattcacttcggattgcgggtgttattgcccggcagcgctatgcttgccgggcctactgcttgtaagtcgggttaaccgacaacgcccacaatcctcaaactcaacgcaataccatcagcagcgccagcaccacgacagcgccgatgcccatagaagccacataccagcgcagatagccattctcgctcaccaccaggcctttgcctgcgaagcgggaaaggatcgccggaatgttcatcagggcattcagcggatcgctcttcagcagccacgccacgccgaggaacggcttaacgaacaccttgtcatacagccagtcaaagccccaggcgttgtaccaccaggtaccgagcagacgacccggcgcgctgttggcaatcgacgtcaccagcgtgcgtttacccagccacagccaggcggcaatcagaataccggcgatagcaatcaccccggaggcaatttccagcgtcatgacgcgtccgtgatcaagctcggtggtctgcggcagtacgccttccagcggcggcacaatcagcgcgccaacgaaggtcgagagcaccagcagcacaatcagcggcagatgatgggtaatccccttccctgcgtgagcgtgaatttgttctttgccgtggaacacgatgaaaatcatacggaaggtgtacagggaagtcataaacgccccgaccaggccggcaaccatcagattcagatgaccgttcgccatcgcgcccgccagaatctcatccttactgaagaagcctgccgtcaccagcggcagcgcggacagcgccgcgccccccaccaggaagcagacgtataccagcggaatagacttacgcaggccgcccatcttgaagatattctgttcgtggtggcaggccagaatcaccgaaccggacgacaggaacagcagcgctttaaagaacgcatgggtcatcagatggaaaatcgccgcatcccacgcctgcacgccgagcgcgaggaacatgtagccaatctggctcatggtggaatacgcgagcacgcgtttgatatcggtctgcaccagcgcggcgaagcctgccagcaccagcgttaccgctccgacaatacccaccagatgcagaatttccggggtcatcaggaacaggccatgggtacgcgcaatcaggtagacgccggcggtcaccatggtggcagcgtggatcagcgcggagaccggggttgggccggccatcgcgtccgcaagccaggtctgcaacggcagctgcgcggatttacccaccgcgccgcccagcagcatcagggttgcccaccacagcatgttattaccggcttcgaagtgcgcaggcgccagttcaaccatttcgcggaagttcagggtgcccagctcgttgtagagaatgaacagcgcgaacgccaggaacacgtcgccgacgcgggtcaccacaaaggctttcatcgccgccgcgccgttctttggatcggtgtaatagaagccgatcagcagataggagcacaggcccacgccttcccagccgagatacatcagcagcaggttatcagcgagcaccagaaccaccatgctggcgataaacaggttggtataggcgaagaagcgggagtagccctcttcgccgcgcatgtaccaggaggcgaacatatggatcaggaagccgacgccggtcaccacggacagcatggtcagagagagaccgtccagcaccaggttgaagccgacgttgaagtcgcccaccgacatccaggtccacagcggcacgctgaccgcctgtttgccgttggcgaagaagtcaacgccgacaaacgccgtgaccagcgccgccaggcctaccgagcctacccctacggtggcggataagttttccgaccagcggccgcgagagaaggccagcaaaacaaagccaatcaatggcaaaagaatggttaaggcaagcatgttcatccgcgcaactcacttactgaatcgatgttcaggttctggcgacgacgatggagctgcagcagcagcgccaggccgatactcgcttccgcggcggcgagggtgatggcgaggatatacattatctggccatcggtctggccccagtagctccctgcaaccacgaaagccagcgccgcggcattgatcatgatctccaggctaatcagcataaacagcagattgcggcggatgaccagccccgtcaggccgaggacaaacaggacagaggcgaggatcagtccatgtgttaaggggatcatgcgtgttcctccgtttttcttttatcgctgtcgttcggacggttgctcagcacttccccgacgcgctcttcacggccgatatggaaggcaacaaccaggcccgcgagcagcagcatggaggccagctccaccgccagaacgtacggaccaaacagcgcaataccgacctctttggcgttaatcgccgcgccgtcgataccctgatcgttaatgccgaggatggcgtaaacgataaccaccagcagtaccgctgcgagaatggccggaccgatccagatcccaggtttcagccactggcgctcctgctcgatttcgctgccgcccaggttgagcatcatcaccacgaacacgaacagcaccatgatggccccggcgtagacgataatttccagcgcaccggcgaaataagcccctaaggagaagaacaccccggcgatcgccaacagcgaaatgatcaggtacagcagcgcgtgcaccggattggtgtgggtgatcacccgcagggttgcgaggatggctatcaggccacagatataaaaagcgaattccattgccctctccttacggtaacaggctcttgacgtcgataggcttagcttcgttctctgcttcgcccttatctttgccgtcgattgccatacccgccatccggtagaagttatattccgggtatttacccggaccggaaatcagcagatcctctttttcgtacaccagatcctgacgtttgtattcgcccagctcaaagtccggggtcaactgaatcgccgtggtcgggcacgcttcttcgcacaggccgcagaaaatgcagcgcgagaagttgatgcggaaaaactccgggtaccagcggccgtctttggtctccgctttttgcagagagatacagcctaccggacaggctaccgcacacaggttacaggcaacgcagcgctcttcgccgtccggatcgcgcgtcagcacgatgcggccacggtagcgcggcggcagatataccggctcttccgggtacatccgagtttcacgtttggcaaaggcgtgcatcccgatcatgcagatactgcggacctgggtgccaaaccctaccaataattcttttaaggtcatggtcaattcaccccttattgcgcctgccagagaatgacagccgccgttaccaacaagttgatcagcgttaacggcaggcataccttccagccaaaggacattacctggtcatagcgcggacgcggtaatgatgcgcggatcaaaatgaacatcatcataaagaacgcggttttcagcgcgaaccagatgaaaggaggtaaccatgggccattccagccgccgaagaacagcgtcacaatcagcgccgatacggtaacaatcccgatatattcaccgacgaagaacagaccgaacttcatgccggagtattcgatgtgataaccgtcagccagctcctgttccgcttccggttggtcaaacgggtgacggtgacataccgctacgcccgcgatcgcaaaggtcacgaagccgaagaactgagggatgacgttccacagatgcgcctggttgttgacgatatcggtcatgttgaatgaaccggcctgcgccaccacgcccatcagggaaagcccgaggaacacttcgtagctcagggtctgggcagaagcacgcatcgcgccaagcagcgagtatttgttgttgctcgaccagccggcgaacagcaccgcatagaccgccagacctgccatcatcaggaagaacaggatcccgatgttcagatcggccaccacccacgtcgggctgaccggcacaatggcgaaggccagcagcagcgaagtaaaggcgatcaccggcgccagagtaaagatcacgcgatccgagaagcgcggaacccagtcctctttaaagaacattttgatcatgtcggcgacgagctgcagcgaaccgccccagcccacgcggttaggcccgtaacggttctggaacaggcccagcagacgacgttcgccaaagctcataaacgcgccgcaggtcaccaccaccagcagaatcactaccgccttaaggatgcctaacagaatgtcgatgagatcgggagttaaccaactcatgctttcgcctcctgcagagtatcaatacgcgctccggtcagcaccggcgcaatccctggcatgcccatcggtaagccaacctgccctgccgtcagccccgccgagattaccagcggcaggctaagcgcctggccatcaacgctgaaggaaaccatcgccccttcgttcacgccaagcttcgcggcatctgccgggttcagcttaacgtacggctgcggcatgcggctctggaataccggagcacgctgcgacagctcgtcgctgccgaacagatggtagtaaggcgcgatacgccatttcccttcttcagcctggaagcttgccggtaccgcggtaaagtactcaagaccgctggcggaggcttcaatcagacgcacgcccggatcgccgtggcgcagtttaccgcccacttcatcctggaacttgttccacgcctgcggggagttccagcccggagcccacgcaaagggaacttgcgagcgcggcgcggacggctggttgttcccttccatggagaaggcaaacatggtgtctttatcctgcggctgacggggttcatgcacgctgatgttggcgcgcatcgccgtacgaccgctatagcggtgcggttcacgggccagcttctgaccgcgaatgcggaaggtcgcatccggcgcggcgtctttgataccggccagctgcggtagcgcggcaatggcggcgtcaatcacgtggtccagctgcgtccagtcaacctggcggttgttaacggtgctgtgcaatgagtgcagccagcgccagctttccagcatcacggttttcgcatcgtagtaggccgggtcgtaaacctggaagaagcgctgggcgcgaccttcgttgttgaccacggtaccgtcgctttccgcgaagcttgccgcggagagcaccagatgcgctttttccataatcgccgtacgctgatggtcaaccaccatgaccagcggcgctttcgccagcgccgcgtcaacgcgggcggctgaagcgtggcggtgcaggtcgttttccagcacgataaccgcatcggcgttaccggtctccagttcactcagcgcctcttcaagcgagccgcctccgatcatcccgaggcctacgctgttcactgcccgggcaaccatggtcacgccaacgtcagcaccgcggcctttcagggctttcgccacgttggcggcggcctgaattacctcgatgctgccggcgttggttccggaaacaatcagcggttttttcgctccggctaacgcctgaacgatcacgtcgattttgcctttcagctcgctgctcagcccttcgaccgccggcgcgctatcgtccagcgcgtgggcgatggcgaagccaagacgcgcctgatcttccaccggcgcgcggtaggtccatgcggcgatatcatcaagacgcgtgtcgtcgatattggtcacgaacagcggatgcttcgcgcgctggccgatgttaaggatcgcggcgatctgccagtcggcgactttctgcgccgccgccatttcacgcgctttgcctttcaccgcctgacgcaccgccagcgcgatacgcgcgccggtctgggtgatgtcctcaccgaggatcagcaccgcatcgtaggattcgatctcgcgcagcgccggggtatgaataccgccttcgcgcagcactttcagcatcatctgcaggcgcgcctgttcgcccttggcgatgccggtatagaagttttcggcgccgaccagctcgcgcagcgcaaagttgctttcaatgctggcgcgcggggagccgataccaatcaccttcttcgactggcgcagaatatctgccgccccctgcatcgcctgttcggcgttgagggcgatcagatcgtcgccgcggcgctgaaccggctgacgcggacgatctttcagattgacatagccatagccgaaacgaccgcggtcgcagaggaagtagcggttaacggtaccgttataacggttttcgatacgacgcagttcgccgtagcgctcgccggggctgatgttacagccgatggaacactgctggcagatgcttggcgcaaactgcatgtcccacttacggttatagcgctcggagtgcgttttatcggtaaagacgccggtcggacagacttccaccaggttaccggagaactcgctttccagcgtaccgtcttccggacggccaaagtagacgttgtcgtgagcgccgtagacgcccaggtcggtaccgtcggcatagtctttgtagtagcgaacgcagcggtagcaggcgatgcagcggttcatttcgtgagagatgaacggccccagatcctggttgcggtgggtacgcttggtaaagcggtagcgacggaagctatgaccggtcattacggtcatatcctgtaagtggcagttgccgccctcttcgcacaccggacagtcgtgcgggtggttggtcatcagccactcaactacgctttcgcggaactgcttcgcttctgcgtcgtcgatggaaataaaagtgccgtcggatgccggtgtcatacaggacatcaccaggcggccacgcgtgtcttccgcgttctgatattgcttcaccgcacactggcggcaagcaccaacgcttcccagcgccggatgccagcaaaagtaaggaatatcaaggcccaaagagagacaagcttctagcaggttgtccgctccgttgacctcgtactctttgccgtctacatgaatcgtagccattagcgtgcttccaaaataaaaaacctttagattaccagcgcgtcttaagcaggttcggctgaatcccgttgattgcatgggtattgctgaactgctgtttaatgccagcttcgaattcttcgcggaaatatttaatcgcgctctgtagcggctcaaccgcacccggcgcgtgcgcgcagaaggttttacccggaccgaggaatcgacacagttgctcaagcgtctcgatatcccccggctggccttcgccgcgctcgagagcgcgcagaattttcacgctccacggcagaccgtcacggcaaggcgtacaccagccgcaggactcacgggcaaagaactcttccaggttgcgtaccagcggcaccatgccgatctcatggtcaaccgccatcgccagcgcggtgcccagacggcttcccgctttaccaatgctttcgaactccatcggtaggtcgagatgcgcttcggtcaggaagtcggtgcccgcgccgcccggctgccaggctttgaacttcaggccatcgcgcatgccgcccgcgtactcttcgaggatctcgcgcgcggtggtgccgaacggcagctcccagacgcccgggttcttcacgcggccggagaaacccatcagcttggtgccggcgtctttactggtcgaaatgttctgataccactcgacgccgttggccagaatcgccggaacgttgcatagggtttcaacgttgtttacgcaggtcggtttgccccagacgccggagctagccgggaacggcggcttcgaacgtgggttggcgcggcggccttcgagggagttaatcagcgcggtttcttcgccgcagatatagcgccctgccccggtgtgcacaaacagttcgaagtcaaaaccggtgccaaggatatttttacccaacaggcccgcttcggtcgcttcggcaatggcccggcgcagatgctgcgccgcttcgatatattcgccgcgcaggaagatatagccgcgccaggctttcagcgcgaacgcggagatcagcatgccttccaccagcaggtgcggcagctgttccatcagcaggcggtctttataggtgcccggctccatttcatcggcgttacacagcaggtaacggatgttcatggactcgtctttcggcatcaggctccacttcagaccggtggaaaagcccgcgccgccgcgccccttcaggccggcgtcttttaccgcagtgacgatttcatccggcgccatgccggagagcgctttacgcgccccggcgtagccgtttttactctggtattcatccagccataccggctgtttgtcgtcgcgcagacgccaggttaacggatgggtttcggcagtacgaataatggttttcatttataccgctccaggaggtcaggaatcgcttccggcgtcagataactgtgagtgtcctcatcaatcatcatggtcggccccttgtcgcagttgcccaggcagcaggtcggcagcagagtgaagcggccatcaaaggtggtttgacccggtttgatatccagcttcttctcaatcgccgactgaatgccctggaacccggtgatgtggcacaccacgctgtcgcagtagcgaatcacgtgacgacccaccggctggcggaaaatctggctgtagaaggtcgcaacgccttctacgtcgctggccgggatccccagcacatcggcgatagcgtagattgcgccgtccggcacccagccgcgctgcttctgaacgatcttcagcgcttcaatggacgccgcacgcgggtcttcgtagtggtgcttctcgtgctcaatcgcctcacgctctgccgcactcagctcaaaagcctcggtttgtggttgttgattctcgtgcataattagcggtccacgtctgacataacaaaatcgatactacccagatagacaatcaggtcggagaccagactgccgcgaatagcggccgggatctgctgcaggtgcgcgaagcttggcgtgcgcacgcgggtacggtagctcatggtgctgccgtcgctggtcaggtagtaactgttaatacccttggtcgcttcaatcatctggaaggattcttgcgccggcatgaccgggccccaggaaacctgcaggaagtgcgtaatcagggtttcgatatgctgcagcgtgcgctcttttggcggtggcgtcgtcagcggatgatccgccttgaacgggccttccggcatgttatcgaggcactgctgaagaatgcgcaggctctggcgcagctcttccactttcagcatcacgcgggtgtagcagtcggagacgccaccgccggtcgggatctcaaagtcgaagttttcatagccagaatagggacgccatttacgtacgtcgaagccgatgccggtcgcgcgcaggcccgcgccggtggtgccccactccagcgcctctttcgcgttgtaggcggcaacccctttcgaacgaccgatgaggatggtgttgcgcagcgcggctttctcataggaatccagacgcttcggcatccactcgaggaattcgcgcagcaggcgatcccagccgcggggcaggtcgtgcgcgacgccgccgatacggaaccaggccgggtgcatacggaaaccggtaatcgcttccaccagatcgtagatcttttgacggtcggtaaaggcaaagaacaccggcgtcatcgccccgacgtcctgaataaaggtagagatgtacagcagatggctgttgatacggaacagctcggagagcatcacgcggatcacgttgacgcgatccggcacggttatccccgccagtttctcaaccgccagcacgtaaggcatttcgttaacgcagccgccgagatattcaatacggtcggtatacggaatgtagctgtgccaggactggcgctcgcccattttctcggcgccgcggtggtggtagccgatatctggcacgcagtcgacgatctcttcgccatcaagctgtagaataatacggaacgcaccgtgagcggaggggtggttcgggccgaggttaaggaacatgaagtcctcgttttcggtcccgcgcttcatgccccactcttccggtttaaaggtcagcgcttccatttccagatcctgtttggctttggtcagctcaaacgggtcaaattcggtggcgcgcgccgggtagtctttacgcagcgggtgaccttcccaggtcggcggcatcatgatgcggcgcagattcgggtgaccatcgaaggtcacgccaaacatctcccaggtttcacgctcataccagttggcgttagggaacagtttggtgaaggtcggcagatgcagatcgttttcagacaaggcaaccttgagcatgatgtcgcggttgcggtctattgaaatcagatgatagaaaacggaaaaatccgcggcgggtaaaccgtcgcggtgcgtgcgcagacgttcgtccatgccgtgcaggtcaaacagcatcacgtaaggcttcggcaatttcttcaggaaatcacccacctcaagcagctgttcacgcttcacccaaaccaccggaacgccggtgcgggttggctgaacggtaaaggcatccggcccaaaacggttgcgcagttcgccgatcaccgggtcatcaaggtgatcgcgggtttgccaggctggtgcggcgtcatgcgcggttaaatcggtcatattgttcaccattgcaaaaggtccgtggtgactgccggcgaggcttcgcgctgtagtagattgatttgcgaagtttttatcccgcccgcaggcgcaagttaaatctcgtccggagtccgcagattggtcactgcaatacgttcgccgcgtttacgctcgcgttccgactgcatattggcgcggtacacgccctgatcgccaaccacccacgagagcggacggcgttctttaccaatggattcctgcagcagcatcagcgcctgcatataagcttccggacgcggcgggcagcccgggatgtaaacatcgaccggaataaacttatccacgccctggacgacagagtaaatatcgtacattccgccggagttggcgcatgcgcccatcgagataacccacttcggctccagcatctggtcataaagacgctgaatgaccggcgccattttagtaaagcaggtgccggcgaccaccatcaggtcagcctgacgcggggaggcacgtaatacttctgcaccaaagcgcgcaacgtcatgcaccgcggtgaatgacgtcaccatttccacgtagcagcaagaaaggccgaagttgtaaggccagattgagttcttacggccccagttcaccatgtcatgcaaggcgtgttcgagtttccccatatacacgcttttattgacttcttgctccagggggtcggttacgatctcctgtttttgcagggggtaacggtcgttctcaccgttaggatcgatgcgggtgagcgtataatccatcttattgcctcgcttttactgcgtatgacggttagtgggactgtctgtttccgggttaaccagcgtgcgacgggagcgcgcaggcgtccagtccagtgcgccgatacgaacgaggtaaaccagaccagccagtagcactaaaatgaaaattgcggcttccacaaagccgacccagccgctttcacggatagaagtcgaccatgcgtagagatacagggcttccacgtcgaagataacgaagaacatggcaaccagataaaacttcgcagaaagacgtaagcgagccgaaccgacggagtcgatcccggattcaaacggcgtgttcttgcttcgcgcgcgcgcgcgtccgccaaggtaccagccgccgacgagcatcaggcagcacaggccgatagcgatgatgagaaatatagcgaatgcccaatgatgagcgatgacttcagtggatgttgacatacgcattgcttaaccaaaaaagtgtagcgctaaaaccctctgctcttactggcagatgaacgccacagcgtttcacggggaggaataaaaaaatagccgtgcaaaaaagcgtccctgggtgatgtggaaggccagttgcggtggctttttactcctttcattaaccttttgtcaactttaacaaaagttttcacaacattaatttacattggatttttttcattaacattaaatgccctttcatgcggaataaccttgcatactgttcggctttagtgttgttgaatcgtgtccgtttccgccgtaaatcaaaatggcccgcctattttgacaggattcagacacgattcctccccctaaggaggggtattttcttgatctgcgacacgcttttgttaattcaaccaagaaaacagcaacaaaccagatggttttttaacattagcaggaagtattgaaagtgcagagaaaagtcgagaaatgagaggaggagcggatctaacctactgatttagctcaaaataaatcaacaaaagtttctattaatcaataaaatttgaaaaaaacgaaccgcagcggcaatttcacacgtctggggttcgtttttacacttacattttgttaccagtttttgtgatgtttgttagcttttcccgctcaggaaataagggaattatctcccccttcaggagtataaacgcgttgcgtggaccacggctggtactctgcgctcagcgactgaaaaatggcctgcgtcagctcgcttgccttctgcggattgcagttcagcatgtagcgggtatccggcagcacgggtaaaccgtcactccggcccggtacgcgaaattcggggctcatcatctctaccggctgcacggtcacgccaagcccggctttcaccgccgccttcacccccgccattgagcttgccgcatgggaaagatgccacgcaacgccggcggcgttgagtacctcaacgatctcttcccgaaacggatccggggcatccagcaaaacaagcgggacagactcgccctgagggaggacataatccgctgcgcagtaccacagcgttggcgacgtgcgcagcgtcagcatgtcggaacccttggtttgtcgggtcgtcagcgcaagatcgattgccccgctcttcagcatatcgacgatatcaaggtgtttgaggactttgatttccagcgtcagcctgggataaaaactaccaatccggtttaacaggcacggtaaaatggtatccgccgtctcatcagaggctcccacggtcagcgttccctgcaggctgccaaacatgagcgacatacaggcttcatcattaaagcgcagaattttccgcgcatagcccagcagctgaatgccctgctcggtcagaagcttattgcgcccgtggcgagcaaaaagttctttgccaaccagctgctccagccgctgcatctgctggctcaccgctgactgggtccggcgcaccgcgacggcggcagcggcaaaggtactgagatcggcgacggcaacaaaggttctcaagagatcgaggtctaaatttagtatcgaacgattttcatttatcatatttgcttcacattcaggcggctaatgcttacctgccttgttgatactgtgctccaggcttccggctaatccttaagcttcgcgttacccgccagagacggacggatgaacaactggacgaacgttattgcattagaaagcactcatccgcagcaaatgcgcggaatttcagagtaatattttgctcgtacgcctaagcgcttttaattacgacgcatttgtttttgtgatgtgacgcaaaaaatagccgtcaatgaccattgtctgcatcctcaccggcgacaaaccttgccatcgggctcaggcagaacaaaaacctgcaataacaatgtattaataaagaaataagctacctggcatagccatatgtcggtattaacggcgatattctaaccgaaaaccacaatatttataagcgttaatcagtattatctcaggccactttaaatgctggttggcgctttaattaaattaacagatctaagaatattccttgcataaaataaaactcatttagctattaaatactttcattaaaaatatctagcaaagttgttacaaccttcagcgtattgtgaattaaacgttcaccagacgatgattcgttttacgcgtaaaaaacaagcgccggtcctctttaaatcaacaaaccagataaacgttcaccaaaacaccaccaggcacaatataagaccatcaataaaattattaaaggtgtaatgtataaacaaaagcgcagttcaccagataaattgattacaccaaaaagcgatgaatagcaaaatcttctcctgttaacccttcaaaacagcggggaggcggagtacattattccgtgctgacttccacggcagggagtggcgataacagctaaaaggtcaaggttcatgtcccccatcgaaaaatccagcaagttagataacgtctgttacgacatccgcggcccggttctgaaagaggcgaaacgccttgaagaagaaggcaataaagtcctgaagctgaacatcggcaacccagcgccgtttggctttgacgcgcctgacgagatcctcgttgacgttatccgcaaccttcctacctcgcagggctacagcgattcaaagggcctctattccgcccgtaaggccatcatgcagcattaccaggcccgcggtatgcgtgatgtgacggtcgaagatatctatattggtaacggcgtttcggagcttatcgtccaggccatgcaggcgctgctgaacagcggcgatgaaatgctggtcccggcgcctgattatccgctgtggaccgccgcggtcgcgctttccagcggtaaagcggtgcattatctttgcgatgagtcgtccgactggttcccggacctcgacgatatccgcgcgaaaatcaccccgcgtacccgcggcatcgtgattatcaacccgaataacccaaccggcgcggtgtactcaaaagagctgctgatggagatcgtcgagatcgcccgccagcataacctgattattttcgccgatgagatctacgataagatcctctacgatgaagcgcagcaccactcaattgcgccgctggccccggatctgctcaccgttacctttaacggtctgtcaaaaacctaccgcgttgccggcttccgccagggttggatggtactgaacgggccgaagaaacacgcaaaaggctatatcgaaggcctggagatgctggcctctatgcgcctgtgcgccaacgtcccggcccagcatgcgatccaaaccgctctcggcggctatcagagcatcagcgaatttattgttcccggcggacgcttgtatgaacagcgtaatcgcgcctgggagctgattaacgacattccgggcgtctcgtgcactaagccgaaaggcgcgctgtatatgttcccgaaaatcgacgctaaacgctttaatattcacgatgaccagaagatggtgctcgattttctgctgcaggagaaagtcctgctggttcagggtaccgcctttaactggccgtggccggaccacgtgcgtattgtgacccttccgcgcgaagacgatcttgaaatggcaattacccgtttcgggcgtttcctttccggctaccaccagctctgattttatctgtccagccgccgggatttgcatccggcggcaatccctgcgcacaatggcacccgacgtcgtaactgattaagggttcctatgagtcagagtcatttctttgcccacctctcccgcctgaaactgatcaaccgctggccgctgatgcgtaatgtgcgcaccgaaaacgtctccgaacacagcttacaggtcgcgatggtggcccatgcgctggcggcgatcaaaaatcgtaaattcggcgggcgggttaacgccgaacgcatcgcgctgctggcgatgtatcacgatgcctcggaagtcctgaccggcgacctgccgacgccggtaaaatatttcaattctcagatcgcgcaagagtacaaagccatcgaaaaaatcgcccagcagaagctggtcgatatggttcctgatgaactgcgcgacatttttgaaccgctgatcgatgaacatcactacagcgaagaggaaaaatcccttgtcaagcaggcggatgcgctttgcgcctacctgaagtgtctggaagagctatcggcggggaacaatgaatttctgctggccaaaggccgccttgaaaaaacgctggaatcgcgccgcagcgcagagatggactactttatgcaggtgttcgtcccgagcttccatctttccctcgatgaaatcagccaggattcgcctttataaccccacacttccccggccagcgtcagcctgaccggggaaggatgccgctgaatcagaacggaaacagcaccgggatcagcaggacgcacactaccatcaccaggagggtgaacggcacgccgattttgacaaaatcgctgaatgaatatttccccggccccagcaccagggtgttcaccggcgacgataccggggtcataaacgccgccgaggccgccatggcgaccaccatcgcaaagggataaggcgaaacccccatcgactttgccgcggccagcgcaatgggcgccatcagcaccgcggtggcggtattggaaataaacaggccgatagccgcgcacatcacgaacaggcagccaagcatcagataaggccctttactccccgccacatccatgaggccctgaaccaccagatccacgccgccggttttctgcagcgccagagcaaaaggcatcattccgacaatcaagataatgctcggccagtggatagctttataggcgctctcggcgttaatacagcggaatttacccatcagcaggcaggcaatgatggccgctatagggttaggaatttcgtcagtcagcatcagcgcgaccatcagcaccagacagaaaatcgcgtgcggcgcctggctgtgcgccggcgaggcgtcgttgacctcgatgggcatattcagcaccacaaagtcacggccccgcttagccagcagcgctatctgccgccagttgcccaccaccagcatgatatcgccaagctgcaaggcttcatcggtcaccgcgccgtcaagggctttgccatcgcgtttcagccccacgatgttcaaatcaaaacgggtacgaaaggcgatttcgcgcaccgacttgccaatcagttctgaatccgggatcagagagacttccgccatccccacgtccagcgcctgatcggaaaaatattcgccgcgcagcaccatcggttcgagcatctgctcgccgcagaactggcgtaaatccacgtctgaggccgacatatcgatcagcaagacgtcgcgggcgcggaattccgatacgccgttaacgttaacgataacccgtcgaaagcgccgccagcgctcaacgccgataacgttcgccccgtagcgctcgcgtagcttcaggtcgtccaggcgctggccaatcatcggcgagccggggcgtatggccaggcggcgcgcgcgccccgtgagatgataatctttaatgagatcgcggaaggtgcttctttttcggccatctcgcgcttgctcgccctcttctcctttgagcataaaacgcatcaccagcatatagaaaacgcccagaaccagcaccaccagacctatcggcgtaacgctaaaaaagctgaatccttgcagcccttcgcgtaaaagttcgctgttaacgaccaggttaggtggtgtggccaccagggtcatcatcccgctgataagtccggcaaaactgagcggcatcatcaaccgcgaaggggaggtgttcatgcgcatcgacacgctgagcaccacggggataaaaatggccaccacgccggtcgagctcataaacgcccctaatccggcaacggttaacatcaaatagaccagcattttggtttcgctgttgccggcaaccttcaccagccaggagcccattttggtggcgaccccggtgcgcaccagcccatcgccaataataaaaagcgcggcaataagaataacgttaggatcgctaaagccggagaaggcctcgctgagcgttaaagtgtcgctgaggacgaaagcgacaatcaccagcaatgcgatagcgtccatgcgcacttttccggtggcaaagagcacgacggctacggcaagaagggataacacccaaatcaattcaccgttcacaacttatccttgtcagaagatggagttggaagtctggcataaaaaagccccgccggcgcggggctaaatcatgagattaatctttaaggataatattcacgttgccgtcaggcaggcgttcaacctgcaggctctccagcgtcgttaatactaaatccgcttcatcaagacgcggcgcatcggcgggcacattgaccgcgatggtgcgacagccggcattcagcccggcgagcagaccggcaggcgcatcctccacgacggcgcaatcccccggcgccagccccaacagttcagctcccagcaggtaggcgtctggtgcgggtttcccgtgctttacgcgctcggcggtaacaaaaaccttcgcctcaggcagtcccgcggcacgatgacgagcgtgggcgacgggtatcgaacccgacgtcacgatcgcccacggaatccccgcgcgatcgagcgtcctgagcaacgccaccgcgcccggcagcgccgttacgccatccgtatccgttgcttctaccgtttccagcagggtgaactctgcctgaatctcctcttcgctgcggccggggagaaaatgacgcaacgaggttatcgcctgtttgccatgaatgaagttcagcacttcatcatgagggatactgaaccgatccgcccatttgcaccacgaacgctccacaaccggcaacgaatcgaccaatgtcccgtcaagatcaaacaggaaacctttacactgcacgggaacctccatcaggcgttgataatttggttaatttcgttactgcttaaatggtactgacgcgggcaggagtgccaggtgctcagcatgcgctggtatttttcccacatcggggtctgggagttaaaaccgtgagtgccggcgtcaaagtggctgtagcgcccttcaacgttaaccataaagcgaacatagccgagatagcgggcttcggtcgccacgtcgaagccgaggaaggtgacccgacgctcgtcaattccgctggcatccttcaggttcgtccaggagacatgcagcgcatgatacatctccatgatatcaatgatggtacgacacgtttcctcggtaagctggccaaactcgcggtccagctcgcgcatctgcagcccgtatccacgctcaatgatggtctgcaggcggcggtagcgttcagcgttgtccggatcgagcatcgtcatcattttgtattgattcgacagaatcagacgctgcgcattggtcatttccatttttgactcctgtggcacttttacgacgtgaaaaaagaaggcgcataattcatgcgccttcttttatatgcgttttcccgatgcaattacaaatcatcaaggaaagttttatccagttgtttgaaggcgcgcttaagcgtgtcagctaaagcctgataatccggcttgccgtcaaccggcgtcagcgcttgtcccgcctcctgcagtttaccccgtacttcataaaaccagttcagtatcgacggcggcagcggcgttaccgaacgcttacccagccaccataagccttgcatcggcagactcagcgcgaacagcgcggtagccacggcagggcccagctggccgccgagggcgatttgccagcacagcgtgaaaatcgccaccggcggcatgatgcgaatcgcatagcgcgtggcgcgaataatacggttttcaataaacaccggggcaaggcgcttatccagaggccaggtctttgcatagtgctgcccgtggcgaaacaagccaaaaaaactcacagggcgattctcgggaccggacatggcttacctcaactttacatataaaacttaaaaaatatgtgcaaaacaccaactgtgcatgacaacgttcaaaagattttggcaatggcggcctcaatcaggtattctgtgcgcacctgaggggcggttagacccttttaccaggttagtcaaattatcgcatattctgccaccggctgaaaattatgcaaaatgacataaaatcaaatgtacttctctcatcgtgcccgaaaacagtacaaggcatgatgttaatcataaatgtcgatgtcatcctgcgctacgctttgtgacacactgacgtttttttagccacgtatcataaaaggtacttccatgtcgagtaagttagtactggttctgaactgcggtagctcctctctgaaattcgctatccttgatgccgtcaacggcgacgaatacctgtccggtttagcagaatgtttccatcttcctgaagcccgtatcaaatggaaaatggacggcagcaagcaagaagccgaattaggcgctggcgctgctcacagtgaagcgctgaactttatcgttaacactattctggcacaaaaaccagaactgtctgctcagctgaccgcaatcggccaccgcatcgttcacggtggtgaaaaatacaccagctccgtcgttatcgatgactccgtgattcagggaatcaaagactccgcctctttcgctccgctgcacaacccggcgcacctgatcggtatcgctgaggcgctgaaatctttccctaatctgaaagacaagaacgttgccgtgttcgacaccgcgttccatcagaccatgccggaagaatcttacctctatgccctgccgtacagcctgtacaaagaacacggcgtacgtcgctacggcgcgcacggcaccagccacttctatgtgactcaggaagccgcgaaagttctgaacaaaccggttgaagagctgaacatcatcacctgccatctgggcaacggtggttccgtttccgctatccgcaacggtaagtgcgttgacacttccatgggtctgactccgctggaaggtctggttatgggtacgcgttctggcgatatcgacccggcaatcattttccatctgcacgatgcgctgggcatgagcgtagacgccatcaacaaaatgctgaccaaagagtccggtctgctcggtttgaccgaagtgaccagcgactgccgctacgttgaagacaactaccaggaaaaagctgacgctaaacgtgccatggacgtttactgccaccgcctggcgaaatatatcggctcctacaccgcgctgatggacggtcgtctggacgccgtcgtattcaccggtggtatcggtgagaacgccgcgatggttcgcgaactgtctctgggcaaactgggcgtactgggctttgaagttgatcacgagcgcaacctggctgcccgtttcggcaagtctggcttcatcaacaaagaaggcactcgcccggctatcgtcattccgaccaacgaagagctggtcatcgcgcaagacgccaaccgtctgaccgcctgattccacaccgccagccataaccctaaataattcgagttgcaggaaggcggcgacgcagagaatccccaggagcgtacgagtagtacgtaactggggtgagcgggtaaagccaacgcacatgcaacttgaagtatgacgggaagctggtggtgcagttttgtatcccgcctgatactggcggtaacgaaagaggatatatcgtgtcccgtacaatcatgctgatccctaccggaaccagcgtaggcctgaccagcgtcagcctcggtgttatccgtgctatggaacgtaaaggcgttcgtctgagcgtctttaaacctatcgctcaaccgcgtgccggtggcgatgcgccagaccagactaccactattattcgcgcgaactccgaccttccggccgcagaaccgctgaagatgagccacgttgagtcgctgctctccagcaaccagaaagacgtgctgatggaagagatcatcgccaactaccacgccaacgctcaggatgcggaagtggtgctggttgaaggtctggtcccgacccgcaaacatcagtttgcccagtctctgaactacgaaatcgcgaaaacgctgaacgctgaaatcgtttttgtgatgtcccagggtaccgatactcctgaacagctgaaagagcgcattgagctgactcgcagcagcttcggcggcgcgaaaaacaccagcgtcaccggcgtgatcgtcaacaagctgaatgcgccggttgacgaacagggccgtactcgccctgacctgtcggaaatcttcgacgactcttccaaagcaaaagtcgtgaagatcgatccggctcagctgcagagcggtagcccattaccggttctgggcgcggtgccgtggagcttcgatctgatcgccacccgcgcgattgatatggcgcatcacctgaacgccaccatcatcaacgaaggcgacatcaatacccgtcgcgtgaagtccgtcaccttctgtgcgcgtagcattccgcacatgctggaacacttccgcgcaggctccctgctggtcacttccgcagaccgtcctgacgttctggtcgccgcctgcctggccgcgatgaacggcgtggaaatcggcgctatcctgctgaccggcggctacgaaatggacgcccgcatcagcaaactgtgcgaacgcgcgtttgcaaccggcctgccggtattcatggttaacaccaacacctggcagacctctctgagcctgcagagcttcaacctggaagttccggttgacgatcacgagcgcatcgagaaagttcaggaatacgtggctaactatatcaacgccgactggattgaatcgctgaccgcaacttccgagcgcagccgtcgcctctctccgccagccttccgctatcagcttaccgagctggcgcgtaaagcaggcaagcgcgtcgtgctgccggaaggcaacgagccgcgtaccgttaaagccgcggctatctgcgccgagcgcggtatcgccacctgcgtactgctgggtaacccggatgaaatcacccgcgtggccgcctctcagggcgtagagctgggcgccggtattgaaatcgttgacccggaagtggttcgcgaaagctacgttgctcgcctggtcgagctgcgtaagagcaaggggatgaccgaagcggttgcccgcgagcagctggaagacaacgtggttctcggcaccctgatgctcgagcaggacgaagtcgacggcctggtatccggcgcggttcacaccaccgccaacaccatccgtccgccgctgcagctgatcaaaactgcgccgggcagctctctggtctcctccgtattcttcatgctgctgccggaacaggtttacgtttacggcgactgcgcgatcaacccggatccgaccgctgaacagctggctgaaatcgccatccagtccgcagactccgcgattgccttcggcatcgaaccgcgcgtggccatgctctcctactccaccggcacctccggcgccggcagcgatgtagagaaagtacgcgaagcgacccgtctggcgcaggaaaaacgtcctgacctgatgatcgacggcccgctgcagtacgatgcagcggtcatggctgacgtagcgaaatccaaagcgccgaactccccggttgccggccgcgctaccgtgtttatcttcccggacctgaacaccggtaacaccacttacaaagccgtacagcgttctgccgacctgatctccatcgggccgatgctgcaggggatgcgtaagccggtgaacgacctgtcccgtggcgcgctggttgacgatatcgtctataccatcgccctgaccgcgattcagtcgtcccagcagcaagcataatctgcccgctgcatgaaaaaaggcgaccggatggtcgcctttttatttacagcagctctcgcgccgccgagacaatatcatgcgccgtcaggccatactccttctgcaagaactcctgcgttcccacctggccatagcgctccttcacccccacgcgacgcatcggaaccgggcaggtctccaccagcacttccgccaccgccgatcccagcccgttatgaatactgtggttttcgcaggtcacaatacgcccggttttctcggcataatttttcaccagcatgcggtcgatgggcttcagggtaaacatatcaatcaccgccgcgctgaccccttcctgctcaagctgacgcgccgcctcaagggcttccgccaccatgatcccgttggcaatcagggtgatgtcgtcgccttcgcgcagcacattccctttgccgatggtaaacgtcgaacccggcgcatagacggtcggcgcctgtttgcggatcgtgcgtacccagtaaaaaccgtcgagatcgataagctgacgcagaatatcctcaaacatcaccgcatcggtcacttccagcaccaccgaatgggccagaccgcgcacgatccccatatcttcaaacgacatatgggttccgccgttatggcaggcggtcaccccggcatccgaagcgatcactttgacgttattccgctgataatcgagcgacataaacagctggtcgaagcagcggcggctggcgaaagcggtaaaggtatggacaaacggcttgcgtccggtcaacgatagcccggcggcggtgccgatcacgttggcttccataatgccgcagttgatgacgtgctgcggatgctgccgcgcgacgccatccatcgccatggagctcatcagatccgcttccagcgcgataatcgggctcctggcttcaatttgctgcgcgacgaatccggcatagactttacgcatctctacggcatctttttgccctgcgggtgcaaccttaatcatgttcagcctccagttggcgaatcgtctcgtttagcgtctctttcatctccgccgtcaggcgtaaatggtggttattactgagattctcgagatacggcacgccctggcctttcacgctatcgagaataaccacgcgcgggcgcgcatcgacgggaggtacgggttgaaccgcggccagcagcccggggatgtcatcgcctttgacggtgacaacatcaaaaccaaaggcgcggaatttatcctccaggttgaaagcgcaaatgatttcatccagcctgccgtcaagctgtaacttgttccagtcaacaaacacggtcagattattcagacggtgatgggcaataaactgaaaggcttcccagcactggccttcattcagctcgccgtcgccaacgatacagaacacgcgattcgcccgccccgccagcttatgcgacagcgccatgccgccggcgatggaaatcccctgccccagcgagcccgtagtggcgtccaccccacgcgttttcagccggtccggatggcttggcagccgcgtaccgttctggtttagcgtgctcagctcctccatcgggaaataccccttaatcgctaacgtactgtacagcgcggggccggcatgaccttttgataacacaaagtagtcgcgctctggccagtccgggtccgcgggatcaattttcatcaccgcgccgtacagtaccgccagcgtctccacgaccgacatactgccgccgtagtggccgaaaccgaggtccgtcagcgatttcagggtagcgacgcgaatgtcccgcgccaggttagtcacttcttgcacattcatgatttcgctccgctgttctcctgcgcgccgccgcccacaggtttctttttcacaaaaacgttgtacgccaccagcagcacaaacaacgccacaacaaggccggtaatcgcaaacggcgacaggtagcgggccaggttacccagcacgatacccacggcgccgaaatccgcatccgagaaagtggtgttggcaaagccaatcgcccccagtaccggcagcagcagcaccggcaggaaggtgatcagcaggccgttggcaaacgcgccaatcatcgccccgcgccgcccgccggtggcgttgccaaagacccccgcggtcgcgccggtaaagaaatgcggcaccacgccgggcaggatcagcacccatttaaactgcccgcagaggaacagcccgaccagaccgccgaggaaactaaacaggaagccaatcagcaccgcgttgggcgcgtaggggtaaacgaccgggcagtccagcgccggacgggcgttgggcaccagcttttctgaaaatccggtaaaggccggcacgatttccgcgaggatcagacgtaccccttgcaggatgatgaacaccccggcggcgaaggtaatcgccataatgatggcgtaaaccaggtagttctggcctccgctaaaggtgctttccacgtactcgcgccccgcgctcaccgccataatcagataaataatcatcatggtcagcgaaatggagatggagctgtcgcgcaggaagctcagatttttcggcaggttcatctcttcagttgaacgagatcctttaccgcagacgctaccgatccaacccgacagcacatagcccagggtgccgaaatggccgaaagcgatatcatccgtgccggtaatacgtttcatatagcgctgggccagcgccgggaagaacgccatcaccagcccgaggatcagggagccggtaaagaccagcccgacgccttcgaaacccgccacggtaagaatcacgccgatcatacaggccatatagaaagtgtggtgaccggtcaggaagatatacttcagacgcgtaaaccgggcgaccacaatattcgctaccatcccgaacgccataatcagcgcggttgaagcaccgtatttttccagggcaatagaaacaatcgcctcgttattaggaataatgccctgaatattaaaagcatgttcaaacatgccccccagcggattcagcgaaccgactaataccgtcgcgccgccgccaagaacaataaaacccagaattgttttaatggttcccttgacgacatcggagaaagatttcttttgcgctaccagaccaattaacgcaattaaaccgaccagcaccgagggtacttttagaatatcaacaacaaaattcagcgtttcaaggataaacatatccacctcgctatcaataattattgtctggcgaaccacgcgcgcagctgcgcttcgagttcgttaatatcgatgatgttggtaatcaccaccagctggctttccggcacgctggcgctggcggcaatgtcttttgccatcacgaataaatccgccgcgcccggcgttgccgacgacagatcggagtgctctacctcggcctcgatatcgagttttttaagcaccttttttatattcatctcaaccataaaactactgcccaggccagagccgcaaattgccataattttcattgttatcaccttttttgggtagagtacgtccacatcacgcaggcgcgtaatgggttataagccggataataaaattgaatcagtagcgcgcgacgatcgtttttatctcctcaatattggttgcctgatgtaatttattcatatcttcatcgctggaaaataattccgccagggcagaaatcatttcgatatggctatgtttatccggcgccgcaagcataatgataatatcaaccgggtcgaactcctcagagccaaacgataccccttgttgcagtttcaacagcgacagccccaggcccttcgcgccctcctcaggccgcgcatgcggcatcgccagtcccggggccagcacgtagtacggcccgagccgctggtgctgctccacgatggccgtcacgtaggcaggttcgataacgtcggccttcagcagcggccgggcgcagatgtccagcgcctgtggccaggtctctacgctttgccgcagcgcgatggtggcatcagagagccaagtcttgagcattttgtcccgcctcttttagcaaaagatgggcaaactttatgcaagcagccaatagttatctgcgagaacgatcacaaagatagcgctaccaacgctaaacattcagatttgtgatagcgctatcaattcgtaatcatcccatcaaaacgcagcaaaaaggcccgtttaaggcgtatactccctgacacgtgaagtaatggatgataataaaaacgtctgtttagcaggaatatgtatgtctctaacccgaaaacggcgtagtaccggtaaagtcacgatcgccgatgttgctcagctggctggtgtgggaacgatgaccgtgtcccgcgcccttcgcacgccggaacaggtttccgataagctccgtgaaaaaatcgaagcggcggtgcaagagctagggtatatgcctaatctcgccgccagcgcgctggcgtctgcctcctcaagaaccatcgcgatggtggtaccaaatcttgccgaggcgggctgttcggcgatgtttgccgggcttcagcagatattacagccggcagggtatcaaatcatgctggcagaatcgcagcaccgtctggagcaggaagaaaagctgctggaaacgctgctggcctctaacatcgccgccgccattctgcttagcgttgaacacagcgataccgtacgccactggctgaagaacgcctcgattccggtggtggagatgggcgcaatgcgcgccgatccgatcgacatgaatatcggtattgataacgtggcggcgatgttcgagctgacggagatgctcatccaccgcggctatcagaatatcggtctgctgtgcgccaatcaggaacagtggatttttcagcagcatttgcaggggtggtataaagccatgctgcgccatcatatgtcgcctaaccgggtaattaacgccgcgctgcccgccaacttttccaccggagcttcacagctgccggagtttttgctggcatggccggagctggatgcgctggtttgcgtttccgatgagctggcatgcggagcgctgtatgaatgtcagcgtcggcgcataaaggtaccggatgatttagccgtcgtcggttttggcgacagcgacgtgagccgggtctgccagccgccgttaacgaccatggcggtaccgcaccataagattggtatagaagccgggcgcgcccttctggagcgtcttacggagggaaactggagcgacagaaagcccatcgcgtccagtttatgcatgagggacagctgttagaaaactactcagcctcttcctgcttttcgctttttgctgactcattattcgcattgcgggtcatccacagcgccagcgcttttaatgagtccggagtgaactcatcgcagcgggcggtgatctcttccggcgtcagccagcacacttcgctcacttcttcttcctgcagcgcgaacgggccgtgcgatacgcagctaaacaggccgccccagacgcggcagtgtttatcttcgtagtagaactgcccgtggtcagcaaaaggcacgccggcaataccgagctcttcttccgcctcacggcgcgcggattccagcatttgctcgtcagcctgcaccacgccgccggcggtggcgtccagcatgcccggctggaaatcttttgtttcggtacgacgctgcaccaggattttgcccatcccatcatgaacaacaatgtaggtcgctcgatgacgcaggcactccgcacgcatttgttcgcggctggactgtgctatcacctcattgttttcattaacaatatcgacccattctgtgcttgccaaatgattctgttccgccatcaggaaaccttactttttaaagcgctcttgcggcgcgtctatacggttgaggggtaaattacgggtaaattgcgacctctgcaataacctgattatcatcgagtgctaaaacctgcaattgcccctcgttcagaagaccgtagctggcggtaaatccccctttagggatgctgaccgagccgggattgaagagaaaaatctcgccgcgtttctcggcaaccggaatatgagtatggccataagccagcacatcgccagcggcgagaggaggcaaattttcggggctatacagatgcccgtgggtcagaaacagacgggttcgcgcgctcaaaacctgctgccagggggcggtaatggggaaccgcagcagcatttgatcgacttcgctgtcgcagttgccgcgtacggcaatcacccgctccgccacgctatttagcgcctccgcgacctgggccggcgcatagccttcgggaagggcgttacgcggcccgtgattgagcacatcgccgaggataaccagccactgcgccccactgcgcgcgaacagcgcaagcacgcgttcagcggcaggcagagagccgtggatatccgaggcaaacatcagcttcatacatttcatctccacgcattacgatgccgctatgataacggaaccgctggcgcttatcagcccgcgcgtttggctgagagtgcgacgtagcgctgaaccgacgcccgctgccactggaaggtggcgtaatccaccagcgcggcgggaacctcatcgccgttcaggaccaggcgattgagcatcagcgccaggtcggtatcggcaatggaccattcgccaaatagattctgcccgccatgggacagcagaacgccagccgttgcaaacagcttgtcggcgctttttttcccggcttcgctgagcggaggtttctttgctgcggcaaagaccacgtccgtggagcgctcttcgcgaatcgtcattaaatcgctacgcagccaggcctgcacctgacgcgcccgcgcgcgcttttgcaggtcatgcgggtaaagccgctcccattccgggggcgcaaagcgctcatccagatattcggtaatcgcggaggattcgctcaggaagaattccccgatctccagcagcggtacgcgacgcgtcgcgctgtagcctttccagccgctttgcaaatgttcgccgctgtcgaggttaacggttttcagggtaaaaggcaggctcttttcctgcagggcaacgtatacggacatcacatatggcgagaaaaaatcggcgtcggaccacagggtaatcgcgggctggctcatagcatcctcaatggctaatgtaatggggcaatacgccaacatatcctgtctttcagaggatgtcactgaccgccacgctgaggatcttacatacttctcagggggtgaacgcgatcggcgaaagtcatccaggatgaggcaaacctgtcggatgatgccagttcacctatactcgaaaagtttgcgacctgtgacggcgaggaattttcatgatcgatttttactacgcacccactcctaatggccacaaaatcacgttattcctcgaagaagcgcagctggcgtatcgcctcatccgggtggatatcggcaagggggaacagtttcatccgcagtttctcgcgatctcacccaacaacaagatcccggcgatcgttgaccacgctcccgccgacggtggtggcccattaagcctgtttgaatccggcgccatcctgctctatctggctgaaaaaacgggaaaattactgagcggcgagctccgcgagcgccacgtcaccctacagtggttattctggcaggtcggcgggttggggccgatgctcggacaaaatcatcacttcaaccactttgctccgcaggcggtgccctacgccattgagcgctatcaggtggaaacgcagcgcctgtatggcgtgctcaatcggcgccttggcgagagtccctggcttggcggcaatcactacagcatcgccgatatcgcctgctggccgtgggtgaatgcccatcagcgccagcgtatcgaccttgccaattacccggcggtgcataactggtttgaacgcattcgccagcgcccggccaccgttgaagcgcttctgaaaacagaagcccattaaccccctgctcgcccgggaagctttgatgtatgattgcggaaattactacacggaggaagcctgccatgtctcaaccagacgccattattcgaattaagaacctgcgcctgcgtacttttatcggaattaaagaggaagagatcgccaaccgccaggacgtggtggttaacgtcgcgatccactacccggcggaaaaatcgcgcaacagcgaagatattaacgatgcgctgaactaccgcaccatcaccaagcgcattattagccatattgagaataaccgcttctctctgctggaaaaattaactcaggatgtgctcgacatcgcacgcgaacatcactgggtcacatatgctgaagtagagatcgataaactgcatgcgctgcgctacgctgattcggtatccatgacgatgagctggcggcgctagacgcatcttagggaggcgctatgaacgttctgcttactggcggtaccggcctgattggccgccatctgatcccccggctactggagcttggacatcacgtaacggtttcaacgcgcagccctgaaaaggccaaaagccgcctcgattcgcgcgtcaccctgtggcgcgatttcgagcatcaggcgaacctcaacggcattgatgccgtcattaatctggccggtgagccgatcgccgataagcgctggacggcggagcagaaacagcgtctctgccacagccgctgggataccacgcaaaagctggtcacgctgttcaacgccagcgatacgccgccctcggtgctgattagcggctccgccgccggttattatggcgacctcggtgaagtcgtggtaaccgaagaggagccaccgcacaacgagtttacccacaagctttgcgcccgctgggagcaaatcgcctgcgaagcgcagagcgatcgcacccgcgtctgcctgctgcgtaccggcgtggtgctggcgccgcgaggcggtattctggccaaaatgacgccggcctttaagcttggcctcggcggccctatcggtagcggaaggcaatatctggcgtggatccacatcgacgacatggtcaacggtattctctggctgctggataacgacctgcgggggccgtttaatatggtttccccttaccctgtgcgcaacgagcaattcgcccacgcgctggggcatgcgctaaatcgccctgccattttccgcgtcccggcggcggctattcgcctgctgatgggagaatcttccgttctggtactcggcggccagcgcgcgctgcctaaacgcctggaagccgccggatttggctttcgttggtacgatctggaagaagccctcgccgatgtgctgcggtagtccaggtccatcagggagagtatcgctctccctgattaattaatttatggaacccgcttcgcagcgcgtaaaaatcaccagtcctgtgtcgccttaactgtgaatctcattccagtgatatgcctttcactctgccataaccctgcgtgtaatttaacaccatcacaccgttgacattcgtcaacaatttattcaatattaccaggacgaattgatgaaggaatatccggataaacatatcagagcagctattgactacgcactggcacgagactggatttttatcactggcggcaaaagcgctcactgttttggcaggttgatgtgtgggacagcccggcaccgggaacatatgatgagcatctggtcaacgcctgcggtacccattaaccacgccaggcaaattatcagaatggtcgaccgctgccagccgcctgcctcgggtcagattaaccacaagaaggattaaaccatggcgctgtataattttacgctcaccctctccggcgtaactgctcgtaccgtgggtctggaagatgcgctgcatgccgcaggctgcgctgacgcactggtctgtttttacggaacggcggtctatctggagttcgatcgcgaaagagactctcttgagcaggctattctgtcagcgattgccgatatcgaatccgcatcggctctgaacgcgcgggttgaatccgtcgattccgcgctggtcggtttaagcgatattgccgaacttaccggcctgacgcgacaggccgtcgccttattaaaagatggcgcacgaggctcaggtcagtttcccgggccggtacagcgggttaaaggcaattccccgctgtggcgctggaaaaccgtcgtgggctggctggtgatggaaggacggcttgccgaagattcaccgctggtcgcccacgcgacagttctggataacctcaacctggcgctacaactgagggcgacgtcggagagcaccaccgtgctgcgctatcttcacggcttcggaaatcagccccgggcttgtccgacggttgcttagacgcattgcccttccggcgctttatgatgttaaggtggcggaataatccaccgctatggaccgctttatgagaatactcaccactccgcgcctgcgcctctctccgtttcactcatccgactggccttttttcctgcgcttacgacgagacccggaagtgatgcgctatatgggcgagattcttgaggagccggcgctgcggacgctgtttgcatcacgctgcgctgacccgggcgtattcgtactgcgcgacgccagcggcgcagcggttggcgatattggcctgcgcatcagcggtaaaaatccgcacgaagcggatgtcggatacgctctcctgcctgaggctcaggggaagggttacgccagtgaagcgctaaaagcgatttgcgactacggatttcagcagctcggcgttcacgcaataaatgcctgggtgctgggcagtaacgctggctcttcccgtctgctggaaaaacacggctttatccgcattcaggtgctcgaaaaagcgtatcatctgaacggcattgactatgacgactgggtgtatcggctggagcgttagccgccccgacggagagtgttccgccgggggctggacagtgtttacttcaaagagcccttcaggaactgctgcagacgctggcttttcggattgccgaaaacctcgtcaggatgcccttcttcttcaattttgccctgatgcaggaagatcacgtgcgaggagacgtggcgtgcaaagcccatttcatgggtgaccacgaccatggttttcccctcttccgccagctgctgcatgatccgcagcacttcgcccaccagttcagggtcaagcgccgacgtcggttcatcaaacagcagtacgtcgggctccatcgccagcgcgcgggcaatggaaacgcgctgctgctggccgccggagagatgaaccggatatttaatctgctgtcgttcatcaataccgactttcgccaggtattttaccgcccgatcgcgcgcttcctgtttactcaggcccagtacctgaatcggcgcctccatcacgttttccagcaccgtcatatggctccacaggttaaaatgctggaataccatcgtcaggcgagtacgtagcaaacgtagctgatttttatcagaaacctttaactgaccatctttatcgcgaaccaggccaatgttttgcccgttaacaacgatcgtcccttcgctgggcttctcaagaaagttaatacagcgcaaaaaggtacttttcccggaaccggatgagccaataatactgatcacgtctccggctttcgcccgcagtgagacgcccttcagtacttcatgctctccgtaacgtttatgcagatcgattacatttaatttattgtcggacatggcgttctcagtgcgtcgaagaaggtttgatatgctggagccagcgcttttccgccctgcggaacaggctaatcaacacatacgagataattaaatacagtactgcggcaataccgaaggcggtaaacggctggtaggttgccgagttaatatcgcgggcaattttcagcagatccggcaccgtggcggtaaaagccagcgcggtggaatgcagcatcagaatcacttcgttgctgtatgcaggcagcgcaatacgcagcgcggaaggcaaaataatgcagcgatacattttgaccgacgaaaaaccgtacgcccgggcggcttctatctcgcctgccggcactgaacgaatcgccccggcgaaaatctccgtggtgtaggcgcaggtattcagcgtcagcgccagcaccgtacagttcaggccgctgcgaaagaaggcgttcagcagttctgtgcctttgacgacctccagcgtgtacattccggaatagaacaccagcagctggacgtacagcggcgtgccgcgaaagatataggtgaacagccagatggggaactggataaatttattgctcgacactcggccaatggcgaggaaaaccgccaggatgccgcccatcaccacggaagagatcagcagccagagcgtaatcgccacgccggtaaagcgatagccgtcggtccacagcagggatttccagtactcctgaataatatcaatcacaggtcggccctcttcacgcccacagaataacggcgttcgagcatcagcagcacaccattggaaaccgttgtaaataccagataaatcaggccacagacgatggcaaagtagaacggctcccaggtgcttttacccgccagctgggttgccttgaccacatcttccagtcccagcagtgagaccagcgcggtcgctttgaggataacctgccagttgttgccgattccgggcagcgcatagcgcatcattgccggaaacagaatacgacgaaaggtttgcccaccgctaaagccgaaggccgtcgccgcttcaatatgtccctttggcaccgccaggaaggcgccgcgaaaggtttcggtgaagtaggccccgtaaataaagcccagcgtgatgatccccgccaccatggggtcgatatcaaactgcgccaggccaagcgcatcggttacgccgttgagcgcaatctgtagcccgtagaaaatcagcagcatcagcaccagatcgggcacgccgcggattaaggtggtatagccttcaaaaatcaacgccaacggacgattgttggaaagtttcgccccggcgcccgccagaccgataagcaccgccagaacgaccgagcttaacgccagctcaagggtgaccagcgcgccctgaaaaataacctgtgaaaacccgtacagcatgctgtctgccctgtctgtcatcaaccatcgcgcgcaaaataacgcgcgacggggtacgcgggatggttagtcgccgtacacgttaaaatcgaaatatttcttcgccagcttgtcgtaggtgccatcctggcgcatctcggcaaaggctttattcagtgcttcacgtagttcgttatcctctttgcgcagccccataccggtgccgacgccgaacagcttctcgtctttaatcgacggaccgccgaactgataatccttgccgataggctgtttgaggaagccttcgctggcggcgacttcatcctggaacgccgcgtcaatgcgtccggcagtcaggtcggaataaatattgtcctgtccctgataggaaacgatttcaatgccttttggcgcccagtgctcgttgccgtaggtttcctgggtggtaccctggagaacgccaacgcgcttgcctttcagcttcgcgaggtctggcgtaatatcgctgccttttttcacgaccaggcgcgaatcagccgcgtacagtttgtcggtgaaggcaatttcctgctggcgtttttcggtgatcgaaagcgaagacataatggcgtcgattttcttcgcttttaaagaagggatcagcgcgtccagcgggttctcaatgaaggtacattgcgtattgatacgcttacagagctcttttgccagatcgatgtcaaaacccaccagttcaccctgcgcattcttcgattcgaacggggcataagtaggatcggtgccgatgcggactttttgcggaatggctgcgaatacagtggaaacgctggaaagggccagcgctaaagagagagacaacgccagttttttcataactatcctcaacagactgtcattctaacggatttattagaagtacttacggcagttatcgtgccattattcgccccggtaaggcaaagcattctgcgccggaaagcaaattttttcgcatcggaaacgcttaactatgcactttttaacatcgcgtgcgcaatttcctgcaccaaattgatccgctaaaagcgcagctgcaccaaaatcagacagaaagggatgcgcatggcccggcgtgcgggccagcgggcgtcttaatcaccgtaaacgttgaagtcgaagtatttcttcgccattttgtcgtaggtgccgtctttacgcatgtcggccagcgctttatcaaacgcggccttcagctcgctatcgtccttacgcaggccgatgccggtaccatcaccgaagaactttttgtctttaacggaaggaccggcaaaggcaaaatctttaccggcaggttgcttgaggaagccctcgctggcggccacttcatcctgcaacgcggcgtccaggcgacccgcagcgaggtctgagtagatcaaatcctgattctgataggccacaacgtccacgccgtggctgcgccagcgttcattaccataggcctcctgggtggagccctgcagtacgccaacatgcttgcctttgagggattccagcgtcggttgaatcggcgagcctttggcggcgatcaggcgggagtcggccgcgtagagcttgtcagagaaggcgatttcctgctggcgtttttccgtaatcgacagcgaagagataatggcgtcgattttcttggccttcagcgacgggatcagggagtcgaaatcgctgccgacccaggtgcattttactttgatgcgcgaacagagttcgttacccaaatcaatgtcaaaacccacgaaatcccctttcgcatcctttgaagagaaaggcgcgtaggtggcatcggtgccaatgcggatactctgcggcagcgcggcgaacgcgctggaggcgctgcaaattcccatcattaaagagagagccaggaccgtcttcttcataggttacccttaagtgtcgtgatgttgttatgcgatgcgttatcttgttatttgtactgccgacaaaagcttgcacgttttatgccattttctcagtgcgtgctggaaatggcgttaaatttgttaaataaaggttgcaggtttgtcttaaaagggaagataccagcaataacggataaaccgcagtgccgcagcgcaaaaaaacaaattaaatgttgaggatttgatcgaggcgacaaaattgcactgcggggaggcggatgtgaacaaagcgcactatcttagtgcgccctacgcgccctgccagcgggaaaagaggtcttgcgggagagagatatcgaactgatcgatcacgcgattgaccgtctgattaatcacatcgtccaggcttttcgggcgatgataaaacgccggaaccggcggcataatcaccgcgcccatttccgccgcctggaccagcagccgcaaatggccaaggtggaacggcgtttcccgtacgcacagcaccagcggccggcgctctttaagcaccacgtccgccgccctggtcagcagcccgtcggtatagctatgaacaatgccggagagggtcttcattgagcatggcaaaatcaccatcccggcggttttaaaagagccggaagagatgctggcggcgatatcgcgggcatcgtgcaccacgtcggctaacgcctgcacctcgcgcagggagaaatccgtctccagcgccagcgtctggcgcgcggcctggcttaaaataagatgggtttcgacatccgaaacttcgcgcaaaacctggagcaagcgtacgccgtaaatcgcgccgctggcgccagaaataccgataatgagtcgcttcacgatgattgcccctttcacacaatggcgcagactttgccggattatagtctccgacgcaaccgcggacccgcatttggcgcgagaaaataaaaaagcccgcggccgtcagaccgcgggctctcagcaaaacagaggattacccttcgttgtgcatctctaagttttcaacttcattctgcagctgaaccgctttcgcgtcgtcgttacgcagagagtcgagatagtccagatactgctgatcgacatctttagtgacgtagataccgttgaacaccgagcattcaaactgctgaatatccggattctccgcgcgcaccgcgtcaatcagatcgtccagatcctggaaaatcaggccatcggcgccgatgatctggcggatctcatctacctcacgcccgtgggctatcagctcattggcggttggcatatcgatgccatacacgttcgggaagcgaatttccggcgcagcggaggccagatacactttcttcgccccggcttcgcgcgccatctcgataatctgctcagaggtggtgccgcgcacgatggagtcatccaccagcagcacgttcttatcgcggaattcggcgcggttggcgttaagcttacggcgcacggacttacggcgcagctgctgaccgggcatgataaaggtacggccaacgtagcggtttttaacaaacccctggcgatacggcttatcgaggatgcgggcaatttccagcgcgatatcgcaggaggtttccggaatgggaatgaccacatcgatatccagatcttcccactcgcgggcaattttctcgcccagcttcgtgcccatattgacgcgggcgctgtaaacggaaattttgtcgatgaaggagtccggacgcgcaaaatagacgtactcgaacaagcacgggttgctgaccgggttttccgcgcactggcgagtaaacagctggcctttttcggtgatatacaccgcttcaccaggcgccacgtcgcgcaggaactcaaagcccagcgtatccagcgccacgctttccgaagcaaccatatactcggtgcggccatcgccgatatcgcgcttgcccagcaccagcggacggatgccgttcgggtcgcggaaagcgaccatgccgtgaccgataatcatcgccacgcaggcataagcgccgcgaatctggcggttggtggcggcgatcgccgcaaaaatgttgtctgcttccagcggatagtggcggaagttgtccaactcgctggcgaagatattgagcaggatttcggaatcagaggtggtgttgatgtggcggcgtttttcttcaaacagctttttacgcagctcgtgagcgttagtcaggttaccgttgtgcgccaacgtaatgccgtatggcgagttgacgtagaaaggctgtgcctcggaggcgctggagctgccagccgtcgggtaacgaacgtgaccaatacccatattgccctgcatacgctgcatatggcgagcttcaaaaacgtcgctcaccagaccgttcgccttacgcaaacggaaacagttgttcgcatcaatggtgatgatgcctgcggcatcctggccacgatgctgaagcaccgttaacgcgtcataaatcgactggtttaccggcataacaccggcgataccgacaataccgcacatacgtcttttcctcgttaagctacatcccaacgcttatgctttgggcaagaaacttgacgagctctgcagatagtcaaagaaccatctgataacgaaactgaactgtgggataagctcagacttttgccagtcttcgcttttcgccataccggtaaagctatcgagaaagaacagaatcgccgagacgattagcaccccgcgcagggcgccaaagcagatccctaacaccctgtcggttcccgacaggccggttttttccaccagctgacctatcacaaagttaacgatagcgccgacgataagcgttgcgataaacagtatcgcgatagcaatcccatttcggaccagttcgtcttcaaagcccgtgaaccagacagccaggtaagtgtagtaatgactggcaacaaagaaagcgcatccccaggttaccagcgataaagcttcacgaacaaagccgcggatcaggctaaccagtgaggaaaaaccaatcaccgcaattatggcgtaatcaatccagaccatatacgtcccacgattttacgccctgtcgtccggttcggggcgcattctaacagaaaaagaaaacgtttgcgtagggatttccgtgccctacagaaataaaaatggcgctgaaaaaacattcaacgccatactgcctttcgcctcttcagggcgcgtcagacaggagtttcagcactctactcctttaaaaaagagagagttagttcggactgtagcccatgaccacgccgctaagtcccgaaagctgcttcagctcaccaagctgacctttcagcttatccttcgaggtatccggccccacgagaatacgggtaattttaccctgcaccggcgtcgaaggcgacgtgtaaactttaaagccggaagcgcgcagcttaccgacaatctcgttgaccttatcggcgttcttcagcgccccaagctgcaccacataggctttaccggtcggtaccggaatttcagcctgctgctgcggtttaggcggcggcgtctgcgccgcaacctgctgctgtggttgcggttgcggcttctctaccggcttcggctgaggtttcggctgtggtttcggtgcgaccactggctcctgcaccacatcaaaactgttgttgttcaccggtatccgcgacggatccagcgatggcgcagcggcatcgccggccctcacctcttccgccgccccttcaggcggctgcgaaggcagcgcctgggtcgccgctggcagcatatccggctcatcgcgatcccccggttttggcaccagcggaatggcggcaaactcatcctgataatgttttttctgaccatccagcagccctggcaggataatcacccccagcgccaccagcacaatcgtcccgactaaacggttctgaaacttactcgccaccgattctccccgcgtctatttcttccattacatgcgccaccgtatggaatgaaccacacaccagcaccgtatcttcaggcccggcgtccgccatcgcggcatgccacgcctcagcgacgctagtatagactttacctgcgcgcaaatgttccagcagctgctccgccgtggctccgcgcggcccttccagcggcgcgcagtaccagtcgtcaacttcggcctgcaaatttgccagcgttcccgcgatatccttgtcatgcagcataccaataaccgccagcacgcgccccgttttcgataaggttttgagacgcccggcgagataggccgccgcatgcggattatgggcaacgtccaggatcgtccggggagcatcgctgattatctgaaaacgccccggcagcatcgcgttttgaacgccatcgcgcaacgcctgctcgttgaccttaagcccgctggcgcgcaaggccgcaatcgccgtagccgcattcggcagcgggacctgcggcagcggcagatcgcttaacgccccctgacgatcgcggaaggaccagccttgttcaccggcgtcatactgccagtcaacgtcacggcgcaggagccgcgcccctttttcgctcgccacctcagcgatggtcaacggcatatcgggttcgccgacgacagccggtttaccagggcggaaaatccccgccttttcgcggccgatgctttcgcgatcgggccccagccagtcggtatggtcgagggcaatactggtcaccaccgccacgtcagcatcgacgatattggtcgcatccaggcggccgcccaggcccacctcaagaatcaccacatccagccgcgcctgctgaaacagccacagcgcggagagtgtgccaaactcgaaatagctcagggaaatctcgccgcgcgcggcttcaatttcggcaaaagaggtcgtatgcgcgagctccgccagctcttcgccctgcacccgcacccgctctgtgtagcgcaccagatgcggcgaactgtaaacgccaaccttatagcccgccgccatcagcaccgactccagggcacggcaggtggtgcctttgccgttggtccccgccaccgtaaagacaaacggcgcaggtttcattaccgccatccgctgcgcgacctcgctgacgcgcgccagcccgagatcgatagttttgctgtgcagatgttccagataagaaagccacgtagccaggggcgacgtggcctgaggaataggttgtttttccatgatgtccggcaagagttaggataactacgcgtaaaaaaaagggcagcgccgtcaggcctgccctctgcattatcaggcctctggttcctgatccggcaccggtggcaccacctcaccttcgtgagcgggttccggatttggcgccggaaggttcatcagcttcgccagaatgctggccagcttcagacgcatttccgggcggcgtacgatcatgtcgatcgcccctttctcaatcaggaactcgctgcgctggaatcccggcggcagcttctcgcgaacggtctgctcgataacgcgggggccggcaaagccgatcagcgcttttggctcagcgatgttgagatcgcccagcatcgcaaagctcgcagacacgccgcccatggttgggtcggtcagcacggagatatacggcaagccgcgctcctgcattttcgccagcgcagcggaggttttcgccatctgcatcagcgacatcagcgcttcctgcatacgggcgccgccggatgcggagaagcaaatcagcgggcagttgtcttccagagcctgctcaaccgcgcgaacaaagcgcgcgccgaccacggagcccatcgacccacccataaaggagaattcgaaagcggcggcaacaaccggcatatcatgcagggtgcctttcatgaccaccagcgcgtctttttcgccggtctctttctgggcggacgccagacggtctttatactttttcgaatcgcggaacttcagcacatctttcggctcgagctcgcttcccagctccacgagggaaccttcgtccagcaggctatgcaggcggttgcgcgccgacatacgcatgtggtgatcgcacttagggcaaacctccaggttgcgctccagctctgcgcggtacaatacctgaccgcagctgtcgcacttggtccatacaccttcagggatacttgccttacgggtgggggttatattgcttttaattcgttcaatccagctcattgataacctttctacctgaacctggtcgatgccagttttgtcgcaaggggcgcataatgccatttttgcccctcacagaccatgaatgttgcacattaaatcataacatcccgtaacatgggataaaaaagtggtcgaaccgctcacacttcactcttcgggcggcggcataccgcccgaagatcgtcgccgcgttatttcgcctgtttcgccgccgcccgcttgtggcggatgacttcaatcacgcccggcaatacggacaggacgataatcgccacgatcagcagcttaaggttttcctggacgatcggcaaatcgccgaacagataacccgcgtaggtaaataacagtacccacagcagcgcgccaacaacgttatacatcgcaaaatgacgataggacatatgccccattcccgccacaaacggcgcaaacgttctgacgatcggcacgaaacgggccaggatgatggtcttaccgccgtggcgttcgtagaagctatgggtcttatccaggtagctgcggcggaaaattttcgaattgggattactgaagagcttttcgccaaacagccggccaatcgtgtagttcaaggcatcgccaacaatcgcggcaatgaccatcagcagcaccattaaatgcacgttgagatcgttggtcggcagcgcggagagcgcgcctgccacaaacagcagcgaatcccccggcaggaacggcgtgaccaccaggccagtttcgcagaacagaatcaaaaataaaatcgcgtatacccaaatgccgtactccgcgaccagttcagccagatgcacatcaatatgcaggataaaatcaattaaaaagtgaatcaggtccatagtttgcgttagcccttaataacccggttagtccgccagaaacagcgggcccatcggcatgaccgggaggtcgtagtgggccgggtagtcgaccgacaccagatacaatccttccgcctttgccgttgcggcagcaagcgtcctgtcttttgccgccagaagttctgcaatccagctctctggctggttaccggcacctacttccatcagactgccgacaatgttccttaccatatgatgtacaaaggcattcgctttgatgtccaccaccacatatgcaccataacgggtgacgttaatatgcatcacgttgcgccacggcgtgcgcgactggcactgtaccgcacgaaacgaggtgaaatcattctctcccagcagacactgagcggcgcgctgcatccgctccgcatccagcgggaggtaataatgggttacgccgcggctcaataccgccggccgcagacgatgattatagataacataacgatagcgacgcgccgtggcgctgaagcgggcatgaaaatccggtggaaccggctttacccagcgcaccgcaatatcgccgggcaaattcgcatttacgcccagcgtccatgcggcatcctgacgctgcgcgcgggtttcaaaatgcacgacctgaccggtaccgtgaacgccagcatccgtacggcccgcgcaaaaaacgttaacaggctcgttcgctacctgcgagagcgccttttccagcttctcctgtacgctgcggacttcgttctgccgctgccagccgtagtacttgctgccatcgtattcgatgcccagcgcgattttgtagaccggcggctgctccatctcagacatcagtacaaatactcctgaaccagcttctcagcgattttcaccgccatcagcgcgccgccaaaacggacgttatcggcgacggaccagaactgcacctgctcaggcataccgtagtcgttatgcacgcagccgacggagaggcgggcgttaccggaagcatcgccgacctgcgtcgggaactcgccctcttcggacagttcgatatcttcgccaaggctaaaggcatcgcacgcctcttcggcggccagcggacgctgcgcttcaaaactcaccatctgcgcgtggccgtaaaacaccggcgactgaacgacgtttgcggagatcatcaggccatcatcctgcaggattttgcggacctcatcgacgatacggcgctcttcacgcacgcttccttcacgatcgggcagcagcggcagcatattgaacgccagctgacgaccgaagaaatcatcttcatcgatcggaataccgttaagcaatttggcgctctgccccgcgagggcatcgaccgcttttttaccgtgagcggaagcggaaagcaggctggtcacgctgatacgcgccaggccgccccgatcgatcaacggtttcaacgccgacagcagctggctggtcaggctattcgcgaccgagataacgttacgattgcggtaatccgccagtacgaacgggttaacatccggtaccaccagcggcacgtccggctccagcgcaaacagaccgcttaaatcaatcaccaggcagcccgcgttagtggcgtcttcgatatacgcggcggaggcctctacaccggcggcaaaaaaggccagctgggcctgggtccagtcaaattccgccgcatcctgaacgataaccgacttgcccgaaaaacgcagatgttcaccggcgctatcgctacgcgccagcgcataaatatcccccaccgggaactgacgatcggcaagcgtttcgaacagggcttcgcctacggcgcccgttgcgcccagtacggcaatattccagccttcagacatggtggtgtactccagaaaaaagcggccctgccggattatccagcaggagcattaagatgatattaacgaacaggatgatgaacggcgttaaagcccagctggcgcaacagcgtcgccgcctgcgcatcgctgcactgtacgtacagcgaagaccattcacggcgttcctgataatttttgcgcagtttgtcgaactcgcccgcagcgcccgcgacttttcgcagcggcgcatcatcgcggcgcacatcatacaccaaatgcgccagccgttttagcgttgcctgatcgagcggcccgtgcagcgtaatgcggccaaactccggcgccggtagcaacgtgtccagcgccacctgctgtggatgaccaataaacgcgctgtaggcctcaaaaacctgcgtcgtaccgcgcgctttgccttcaagggtatagccggcaatatgcggcgtaccaatatccacccgcttgagcaattcggtattcagatccggctccggctcccaaacatccagcaccacgcttaatgcctgcccggcctgcagccgctgcagcagcgcggcgttatccaccaccggaccacggcaggcgttgattaaaatcgtccccggcttcaggcggcgaatcagcgcctcatccgccaggtgcagcgttttgtactgcccttccttatagagcggggtatggaacgtcaaaatgtccgcgtcctgcaccagctcgtcaagggagcggaaatccccctcgtcgccgcgatcggcgcgcggcggatcgcagagcagcgttttgattcccagcgcctcaaggcgtttttgcagacgcccgcccacgttgccgacgcccacgatcccgacggtacggtcggccagcgcaaaaccgtcacgctcggccagcatgagcagcgcggaaaacacatattccaccaccgcgatagcgttgcagcccggcgccgcggaaaaaccgattcccgcctgctgtagccacgcctgatcgacatgatcggtacccgccgtcgcggtgccaacaaatttgatcgctttgccagaaagtagcgcttcgttaactttggtgacggatcgcaccatcagcgcatcggcgtcattcagcgcttcaaccgggacagggcgacctgcaacggccttcacttcccccaggcggctaaaaagctcgcgcgcatagggcatattttcatcaacgaggattttcacggttcagtacctgtctgagagcgagagtaaaccggggaagtgtgccataatctgcccgccaggaacatcaccacccggcccttagtacagtaatttagtacagcaatacgcaaaggattaatcatgacgcaacccgtttcaggtatgtccgatcgccctccgggctcaggcgaacctccgctcaccactcagcagcgtaccgcgcttgagcggctcattacgcgcctggtggctttaacatcccagcaaaatgcggaagtgtgggcctgcgtaaaacacgatctgagcctgaaaaacgacgcgccgctgctggcaagccattttgccgccgccgagaacagcctgaaccagcgcctaatcctcgcccagcaaaatcatcaccgtcggcaaatcctggcgcagctgagcgagctgctgaatcagggcaacaatcgccaggcggtcagcgattatattcgtcagcatgacggtcaaaccgccctgcatgccttgtcccagccgcagctggagaatgttctgcagctcctgcaaagcggccagctctcgattcctcagccgcagcagcgcccgccaacgcatcgtccgctgctgcccgcggagcacaacacgctcaatcagcaggtgaccagactcgcggcggccaccggcgagtccagcaagcttatctggcaatccatgctggagctaagcggcgtcaagagcggagagctgatcccggcgacccacttcactcccctctcgtactggctacatgcccggcaaacgctcagttcgcaggctgcgccgacgctgacctcgctgcaggccgcattaaaacagccgcttgaagccgcggaatggcaaagagtgatggattttgcccaaacccactggcacgcgacggcgaaaacgccgctcagcgcggcgcagctgctgacgctgctcaacaaaattttcgtgctcagggtcgccagagcccaggagacgctggcgatcccgccggttcaggcgcctcccgcctcaccgtggctggtattgaaaaaaccgtgggttatcgcgctggcagttatcgtggtgcttgccctgctgtggctggtgatttaaggagatatcatcggcccgcatgccgggccgaatgaagcgctacttacgcagcgacaccaggctaaccaggatccccagcacggcgcatattgccgcggccaggaagacggaagagtagcctaacgacgtcgccagcagcccggtaagcgggccggtgacgccgtaagagatatcctgaaacgcggcatagccgccaagcgccgttcctcgtacctgcggcggtacccgcttcacgacctcgacgcccagcgccgggaagataagcgagcatccgcagccggtgagcgccgcccccgccagcgcgatccaggcattgggcgcctgccagagcagcgccaggcctatcgcttcaatcagcagcgaaacgatggccactttcaccccgccgaagcggtccggcatccagccaaacagtacgcgcatcaggacaaacgccccgccaaacgcggtcagcgtaaaaccggccatcgcccagccgttgctggcgaaatacaaagagacaaatgtgccaattaccgcgaagccgacgccctgaaggccaagaccgataccgggccgccagatcattcccaccacgctccacagcgacggccgctcgccgccgtgagcaggaattttacgcaccgtgccgttaatcgcccaggccactaacggcagcaccatggtgacgcaggccagcgccgcgacgccgtaatggctgtagatcagcagccccagcggcgccccggccgccagagagccgtatatcgccataccgttccacgacatgactttaccggagcgcatgggccccaccagccccatcccccagcttaaattaccggtgagcagctggctttcaccaaaacccaggatcagacggccaagcaccagcaggccaaacttcgccatgaccggcaccggcagcagcgcggcgcacagccaggcgccccccgccagcgcgcaggccaacatcccctgcaggacagagcgtttggcgccgtactgatcggcaaggcggccggcatagccgcgggttaatacggtcgccagaaactggataccgacggcgacgccaaccatggtattgccaaatcccagttcctgatggacaaacaaagggataaccggtagcggcaggccgacggtcatataggtgagaaaaacggcgaacgtgatccgaaacagcgaaccattcgctgaaggagtgcgttttgtttcagtgactgcggacatgctttactccagttcgcagagtaaggcgaggtgagaccacgccctctccacctgattatcagggttaaggcgcgttggatgacgttaaacgcttacgcattatctgagagaataatgttgtgccaggagtttgccttttctcccgggggtctgtcaagaatacaaaaaagggagcccgttggctccccttgtaaagcgtgttcgttatgcgcggtatttgcgcatgaccagcgtggcgttagtcccgccaaagccgaagctgttagacatcacggtcgtcagcgcgcgttcggtcggctcggtcacgatattcaggccggcggcctgctcgtccatctcttcgatgttgatgctcggcgcaataaagccgtgttccagcatcagcagggagtagatagcttcctgtacgccagcggcgcccagggagtggccggtcatcgctttggtcgcggagatcgctgggctgttatcaccgaagacttcacgaatcgcccccagctccttcacatcgcctaccggagtagaagtaccgtgggagttcaggtagtcaatcggtgtgtcaacgccgtccatcgccatcttcatgcagcgaaccgcaccttcaccggacggggcaaccatgtctgcgccatcggacgttgcgccgtagccaacgatttcagcatagatgtgcgcgccgcgcgccagagcatgttccagctcttcaaccacaaccataccgccgccgcccgcgataacgaaaccatcacgatgggtgtcataggtacgagacgctttttctggcgtttcgttgtatttggtggacagcgcgcccatcgcgtcgaattcacacgccatttcccagcacagctcttcgccgccgccggcaaacacgatgtcctgtttgcccagctggatttgttcaacagcgttaccgatgcagtgggcggaagtcgcacaggcggagctgatggagtagttcacgccgtagattttgaacggtgttgcaaggcaagcggataccgcggacgccatcgctttggtcaccacgtaggggccaaccgctttcagaccgcgcgggctgcgcattgcatcagcgccgaaaacctgagatttagaagaaccgccagaaccggcaatcaggcccacgcgcgggttttgctgatagacttcatctttcaggccagcatcttcaattgcctgctgcatggaaagataggaatagatagaggcatcgttcatgaaacgaaccactttacggtcgatcaagccggtggtgtccagtttgacgttgccccatacgtggctgcgcattcctgaatctttaaactcttcagagaaagtgatcccggagcgtccttcacgcagagatgccaggacttcctgctggttattaccaatactggaaacgatgcccaggccagtaatcactgcacgtttcattcaatacctctgtaagtcgcactatattaagtttcgagtcgcacaatagcgtacacttgtacgccgaacaagtccgatcagccaatttgtgtataaatttgcgccctcaggcacacatcgttaagatcgttctacgccttgtgattcgagtaacttacgtgaaacaaaacgccatacaacccgccaacctggaattcaacgctgagggtacacctgtttcccgagattttgacgatgtctacttttccaatgacaacggtctggaagagacgcgctacgttttcctcgacggaaaccagctcaaggaacgcttccctgagcatgcacgtccgttctttgtggttgccgaaagcgggttcggtaccggcctgaatttcctcacgctgtggcaggcgtttgacgtttttcaccgcgataaaccagaagctaccctgcaaagattacatttcatcagtttcgaaaaatttccgctgaaagcggaggacctgcgccttgctcaccagcgctggccggagcttgcaacctgggccgagcagctgcaggcgcagtggcctctgcccatcgcgggctgccatcgtctgctgctggatgaagggcgggtcacgctggatttgtggtttggcgatattaatgaactgaccaacgagctcgatgattcgcttaatcagcaggtggacgcctggtttcttgatggctttgccccggcaaaaaatccggacatgtggacggcggagctgtttgcggcgatggctcgtctggcaagacccggcggtaccctggccaccttcacctccgccggctttgtgcgccgcggcctgcaggaggccggtttcagcatgcagaagcgcaagggttttggccgcaagcgcgaaatgctgaccggcgaaatgcgtgaaacgccggagatccccgcgcgcgcgccgtggtttgcccgcagcggtacggaacagcgcgatgccgcgattatcggcggggggatcgccagcgccctgctcgcgctggcgctgctgcgccgcggatggcaggtaacgttatactgcgccgacagcgcgccggctgaaggcgcatccggaaaccgccagggcgcgctctatccgctgctcagccagcacgatgccgccctggcccgcttcttcccggcggcatttactttcgcccgccgcctgtatgacgctctgccggtgatgttcgatcatgactggtgcggcgtgacgcaactgggctgggatacgaaaagcgcgcagaaaatcgcccagatgattgcgcttaacctgccgccggaaatcgccgtcgccgtggacgcccgaaccactgcgcaacaaaccggtgtggaaaccggctgcgggggcatcgcctatcctgccggcggctggctttgtccgcagcagttaaccgctgaactactggccctcgccgccactcgcggattgcgcgtgcgctacgattatccggtcacggagctcagcgcagacaacaacggctggcaattaaaccagcggcagtaccacgaggtcgtggtgctggccaacggccatcagatgacccgctttagccagacggagcatcttcccatgtacccggttgccggtcaggttagccatattccgacgacgccagggctatcgaaattgcgccaggtcctgtgctacaacggctacctgacgccgcaaaacccgcataatcagcaacactgcattggcgcaagctaccaccgcggacaggcagaggccgcgtttagcgccgaggatcagcagcagaatcgccagcgcctgattgactgtttcccgcaggcggaatggacgcgggaggtagacttgagcgctaatcaggcccgcagcggcgtgcgctgcgcaacccgcgatcatttgccgatggtcggcagcgtgcctgattatgaggccaccttacgcgaatatgcctcgctggctgaacgtcaggagcaggccggagaagcgccggtttaccgcaacctgtatatgctgggcgcgctgggctcgcgcggcctgtgctccgcgccgctggcggctgaaattctggcgtcgcaaatgagcaatgagccattacccatggataaagaaacgctggcggcgctgaatcctaaccggctgtgggtaagaaaactgctgaaagggaaagcggtgaaataattgcgggaaatagagcccggctgagcgaatgccgggctttggcggagggcagaactatttctgcatcgccttctggtacaaactgttccacatttcctgcaccagaacctgatccggcggcgacagttcgcccgcgctgatggctttttccaggctccgggataccttgtcatgtaccgcttgcgcagtatgctcgccctctccttccagctcggccaccgccagcgtcaggtggccgcgcagataaccgccggcaaacagttcgtcatcactggcgtggtcgaccatatcatcaattaacgccagaatgcgtgattcaaactccgcgatcatcttctttcctcatagtatgtaaagtgtggccttagtgcaggtcttccggccacgggaactgttctgccgtcaagggcggcgtttggtaatattcttgcagcgcctgaatgaaacgcgcgggacgctcagggatcccctgctccagataggtcatcacctgggcatgcacgcgccgctgaaaagcgatccgatcgggctcaaaatccccttccaggttgtcgcagctgacgttaaatgggtatcccgccgccacgcaaaacagccagtcaaacgcctgaggcttcacctcaacgtcttcaaattgagactgggtcatcgcgtcgcgaccgtccgggcagtaccagtaaccgaaatctaccagctcacgtcgcgccttcccggcaatgcaccagtgcgatatctcgtgcagtccgctggcgtaaaagccgtgggcaaagacgatacggttgtaaggcacgtcatcatctgccggaagatagatcggttcgtcatcgcctttaatcagacgggtattaaaatcttcagcaaaacagccgtcgaaaatttcaatcagctgttcatatttatgcgtgctgttcattagttcatccccagccactggaggaactcctgtccatggctgtcataaagcagttttgcactcatcaccgccgacaccacgacgatcatcggtcgaatcagtgactgtcctttgctcagcaccagccgcgatcccgcacgggcgccgataaattgcccggccagcatcacaaagccggtagcccatatcaccttgccgccaataataaacaacagcaggccgccaacgttagacgtcgcgttaagcaattttgcatgcgcggtcgatttcgccagattgaaccccgcgagggtgacgaaagccagcgcgtaaaacgatccggcgcccggaccaaagaaaccgtcgtaaaaaccgacgcagccgccagccaccagggcaaacggcagaccgtacagacgtcgctgccggtcctcttcgccgagcttcggcatcagcagaaaatagaggccaatgccgataaccaggattggcagtatctgcttgagaatatcggactggacgtgctggaccagcagcgcgccgcccgtcgagccgagaaaggtcatcagaatattgagcttctggtcggcaagattcaccaccttgcggcggatgaaataaagcgaagcggacagcgacccgccgcaggcctgcagcttgttggtggccagcgcctgcgcagggggaagacccgccgccatcagggccgggacggtcaataacccgccgccgcccgccagtgaatcgataaatcccgccagaatggccacgaaaaacagtacgaccagtaccgtcggtgacaccataaaaacgtcgataaaactatccattaaagaatatgctcatccagtagcgcctggcaggaaggcggcagcggaggcggcgtcttcttcacaggaggggttgatcctggcttagggggttcaaaccagctttgcaattccgcaccgcagccatcgcccgccggaggcggagcctggtcttcacactcgaggctgtcggccgggcagcgcaggcgcacgtgcatatgcgctcggtgctggaaccatgggcgaactttgcgtagccagtcgcgatcgctaccggcatccaggcacagctgctgcttaatcgccgggttgacgaaaatacgcgtaacgtcgctatcttgcgccgccatcttaatcagctggctgatttgcgggctccacagcgacggcactacgcgtttgccgtcgcgggccaccaggtccagcgcctgcggcttcagcagctgagctgaactccaacgcgcctgcggcagctgaagaaaaatatcgacatccagtccggactgatggctggcgtggccgccgttaaagcgcccgccggccggcatacccatgtcgccaatcagcaccgttcccatgcctttattgtgcgcctgattgctcagacgctgaataaactgcacgaggtccggatggccgaagtagcgattctgatcggtacgcatcacctgataaccagtggcgtttaacggcagcgcctgcgcgccaacgatacagccattggcaaacgcgccaatggactgcgggctgccgctaacgggctgcgtaattttctgccacggcgtcgccgccaggctggtaccgctggcgaggagcgccagcagtgcgataacggtgtttttcatctatgaccagcgtggaattgatgtcgtcacgtcgccattttgcgcgcgctgacgcataaagtgatccattaacacgatcgccagcatcgcttcggcaataggtaccgcacgaataccgacgcaaggatcgtgacgccctttggtgatcatctcaacttcttcgccaaagcgattgatcgtgtgacccgggacggtgatgctggaggtcggcttcagcgcgatattcgccacgatctgctgaccgctgctgatgccgccgagaatgccgcccgcgtggttgctctggaagcccgctttggtaatttcatcgcggttttcgctgccgcgcagcttcaccacctcaaaaccatcgccaatttccacgcccttcaccgcattgatgctcatcagcgcgtgcgcgatatcggcatccagacggtcgaataccggctcgcccagtcccggcggtacgccatcggccaccacggtgaccttcgccccgatggagtcgccctcttttttcaggccgcgcatcagttcatcaagcgcttcgattttgtccggatccgggcagaagaacgggttctgctctacctgatcccacgcttttatcgccagcgggatatcgcccatctgggtcaggcaaccgcgaatcacaataccaaatttcgcggcgaggaatttcttggcaatcgcccctgcggccacgcgcatggcggtttcacgcgcagaggaacgaccgccgccgcgatagtcgcgcaggccatatttctgctcgtaggtgtagtcagcgtgtcccgggcggaaaacgtccttaatggcgccgtagtcctgagaacgctggtcggtattctcaatcagcaggccaatgctggtcccggtggtcaccccctcgaatacgccggagaggatcttcacctggtccggctcgcggcgctgggtggtatagcgtgaggttcccggacgacggcgatcgagatcgtgctggagatcggcttcggttagcggaatgcctggcggcacgccgtcaacgatgcagcccagcgccaggccatgcgactcgccgaacgtcgtgacgcgaaagagttgtccaattgtgtttcctgccatcacggctccgtttttgtcgttatgtttgcgtgttgttttagtctttataaataccgaaatgcgcgcgggcggcaatcagctgcggtttagtcagcataaagacgccatcgccgccgttttcaaactccagccaggtaaatggcacgtcaggatattgctccatcagatgtaccatgctgttaccgacttcacaaatcaggataccgtcatcgctgagataatccggcgcgcaggcgaggatccggcgggttaacttcagaccatcgctaccggaagccagccccaggaccggttcatggcgatattcacccggcaggtcggacatatcttcttcatcgacgtacggcggattggtcacgatcagatcgtattgcaccttcggcagatcgcggaacagatcggagcgaatcggcgtaacgttatgaattaagccgtgatcttccacgttctgctcggtaacggccagcgcgtcaggggaaatatccaccgcatcgacttccgcttccgggaaagcgtaagcgcaggcgatagcgatacagccgctgccggtgcacatatcaaggatgtgctgcggatagtggtcaatcaggccggaaaaatggttgttaatgagttcgccaatcggcgagcgcggcaccagcacgcgttcatcgacgtaaaactcatggccgcagaaccaggctttgttggtcaaataagcgaccggaatgcgctcgttaatacggcgaatgacgcgctcaacgatgcgatgtttttcgctggaagtcagacgcgcggtacgcatatcttccggaatatcaagcggcagatacagcgaaggcatcaccagctgtacggcttcatcccacgggttatcggtgccgtgtccgtaccagatatttgcagcgctgaagcggcttaccgcccaacgcagcatgtcctgaatggtatgaagctcattcacggcttcatcaacaaaaattttatccacgctatcccccagggcacgctctgctataaattcggcggctagtttgccacgaagacggggataaatcagcattcttacgtcaggcggagggggaaaaataggttttccttgcctggatgcgtggcgagtcgggtaaactaccgacaaagaaaaaatgagatcagataatgaaaaagaaaacatcgctaagcgaggaggatcaggcattgttccggcagctgatgaccggcacgcgtcagattaagcaggacaccatcgttcatcgcccgcagcgtaaaaaaatcgctgaagtaccgcccaagcggctgctccaggagcaggcggataacagccactatttttccgatgagtttcagccgctgctgaataccgaagggtcggttaagtatgtgcgctcggacgtcagccattttgagctgaaaaagctgcgtcggggtgattattcgccggagctgtttctcgacctgcacggtttaacccagcagcaggccaagcaggaactgggagccttgattgccgcctgccgtcgcgagcacgtattctgcgccagcgtgatgcacgggcatggaaagcatattcttaaacagcaaacgccgctgtggctggcccagcacccgcatattatggcgtttcatcaggcaccaaaagagtacggcggagacgccgcactgctggtactgattgaagttgaagagtggcaaccgccggagcttccgtaaacgtcagccccggagggaatcagatagccttcgccatcttcaaattgcaggggctcatttgccagttgaattcgcctttgccgctggcatcaagcgtgacgcaggcaatcgccgaagtggtgaacatcgggggagtttcccccgggcacagctctgagacgaggtaccccaccagagggaggtgagacacgaccagcgccgtcgccacaccttcattcgccagcgcctgcagataagcgctaaccatgccaacgtcgccgcacggcgtgagttccggcatcacgtcgacatcttttggcagattcatgcactccccaacaatttccagcgtctgttctgcacgcaggtagggactcacaagaacccgctcaatatccactttttgacctttcagccaggtagccatctgacgagactcatcgcaaccgcagacggttaatggacgaaccgagtcactggctgcatcgagggcagcgtcgccgtgacgcatgataaaaacttgcatattgcaccgcttttgttaaccagaagcaccgcggtcttacccacgtagacgatacgcaggtgacccggtggccgggcattgtgcctgatccattcaacgaatgaaacgctgttttttacctcaatggcgtaagtatagtcaactattgcttacaaaatcgccaaagcgcagcgccgttcattaccggatttaccttctttgaccacaacttaggtcgtacgttcctcagcgggccaaaaggtcgccccctgctcggccatgtgtaacaaagtgtcacatggtgtaaaacgcgggccgtactgagcagccaggcgctgcaatatcgcggcgacctcccccgctcccagggtatccatatagcggaacgggccgccaagaaacggcggaaaaccaatgccaaatacggcgccgatatcaccatcgcgggcgctgcgaaccactcgctcatcgaagcagcgcgccgcttcgttaagcatcatcatcacgcagcgttccgccacctgctgcgcggacaagcgcgcctgcggtgaggaaatacccaataaagcgtagattgcaggatcgggccgttttttgcttttacgcccttttgccgcataaagatagaaaccccggttattttttctccctttgcgatcgtcattcagaatcgagctaatgatgtttgcaggcgggctaaaacgatctccccatgcggcctccagcaccgggataattttggtaccggtatcgattcccacttcatcaaggagctgaatagggccaaccggaaaaccgaatttaaccaaagcgttatcaatatgctctaccggctcgccttccatcaacaggcgcatggcttcatttatgtagggggccagaatgcggttaacataaaagcccgctttatcggcgacgacaatcggcgttttaccctgcagtttcgccagcttaaccgccgtcgcaattgtttgccgatccgtaccactatgtggaatcacctccaccagcggcattttgtctaccgggctaaagaagtgaagcccgatgacccgctgcggcctgcttgcatgcgccgcgatctcgccgatcggtaaagacgaggtgttagaagcaaagatcgtctccgggcggcagtgctgttcaacttcgctgaccatcttctgcttgagcgtaaggtcttcaaacaccgcttcgatcaccacatcgcgatgtgcaaatccctgataatccagcgaaccggatattaaccccatctggcgatcgcgctcgctggcgcgcagatagcggcgacgcacctgtttatcgagcagatcccagctgtacttcagcgcgtgatttatcccgcgcggctggatgtccttaatgcgtaccggtaatccgcctttgcaggcggtgacgtaagcgataccgccccccatgagtcctccgcccagaatgcccacgctgcgcagcgcgacgggatcagcatccgcgccgcgatcttttttcagatcggtgctggcgaaaaaaatcgaccgtagcgcctgcgattgcggcgtcatcgccagctcgccaaaagcgcgggcctcctcggcgtatccgctgctgcagccctgcgccagtccggtttcaatcacctgcagaatgcgctcagttgccgggtagttcccctgggttttgtgatgcgtctttttcgcgaccagacgaaacagcaggctgcggccaagcgggcctgcgagaatacgttcgcgcgccggaacagcgcggcttgccgggcgacctttgagcgccagttcaatcgcggtttgcagcaggatagtctgcggcaccacctcatcaaccagccctgccttcagggcctgacgcgggcgaagctgcttaccggtcaggatcatctccagcgcgccgctgacgccaattaatcgcggtagacgctgagttccgccagagccgggcagcagccccagctgaacttccgggaggccaagccgggttttatcgtcatcgctgcatacccgcccgtggcaggccagcgccagctcaaggccgccgcccaggcatgcgccgtggatagcggcaatcaccggaatcgacagaccgtggatctcggccatgatttgctgaccctgacgggcaagcgcctccgcttcctgcgcggaatggcagcgggcaatcatattgatatccgccccggcgataaagttatccgcttttgccgagatgaacaccgcgccgcgcagctccttattgtcgcggatctggcggatgatcccccgtacctcgctggcgaactcagctttcagggtattcattttttcaccggacgcgtcaatggtgatgacggcgatattgtccgggcgaacctcaagcgtaaatgccgatacggtttccattattcggcctccagaaccatcgctgaacccaacccacccgccgcgcaggcggtgaccagaccaaatccgccgccgcgccgccgcagttcatgcagcgtttgggtaatcattcgcgcgccggtggcggcaaagggatgaccgtaggcaatcgagccgccaagcacgttaaatttgctctcgtccacttccccggtagcctgagagcggccaagcacttcgcgggcaaagcgattgctggccatacattgcaggttggccagcgtttgcgcggcaaaagcttcatgcatatcaatcagggtcaaatcagccagcgtcagccccgctctttccagcgccagcggcgtcgaccacgccgggcccagcagcatatcctggcgaacatcaatcgcggtgaaagcgtagcttcgcagatagcccagcggaacaaggcccagctctttagcccgggattcggtcatcaggatcaccgccgccgctccatcggttagcggcgtactgttcgcggcggttacgctcccgtgttgacgatcgaaggccgggcgtaacttttggtaatccgccagggttgaatttttacgaatattattatcctgttccagcggttcacggaacggcggcgtgtacgccgtcatcacttctgccgagagcttaccttcctcccaggctctggcggcaagctggtgtgaacgcagcgccagcgcatcctgccgttcgcgcgtgatagcccacgttttcgccatctgctcggcggtatcgcccatccgcaggccggttgagtattcggcaaccgctggcggtacgggcagaaggtcgcgcaaacgcagccgagaaaatagcttcagacgctgtcccagggtgcgagctttgttggcatcaacaagcgttcgggcgagttttttgctgacgccaataggtaatacggaagaggagtcggctccgccggcgatacccgcgcgaatagtgcctgccatcaggctttccgcgacgttggctaccgcctgaaagctggtcgcacaggcgcggctgacgctgtaggcatcggtatgcacgctcataccggtccccagcacaatttcccgggcgatgttcggcgcttccggcatctgcaccacctggccaaataccagctggtctattatgtccgcggggatgttgctgcgagccagcatttcgccgaccaccagcttacctaaatcaacggccggcacgccgtgaaaagccgtcgcctgtcgggcaaacggagtacgtaaaccgctgactatcgcgatacgatcgccctggcgggtgactagcggtaatgcctgactcataacgctcccctgttaaccgataaaacaaagtggtctgacctgataacagttttaactaatattttacattaagccaatcggggaaccgaaaaagtgggagccaaaacacattgattagaaaaggtaacgcccctgccatgaggggcattaagggaaggattaacgcaagccgagctggaaaatcagggtttcagcttcacagctgaacacgaaatcgatatccagcttcacgccaccatcaacgtcggtaaaggtcggggtgattttgcacggctctgattcaacgttacgcgctctttcgcttaatgcggcgagcgtttcttcggcttcggcacggttcgcaaacacgcggctataagaggcggtgcaatcggtgttgtccataatggtgccaacatccatacagcagcaaaccggggtttcatcagcactgcatttactcatcgtagatttcctctgtatatgcactcaaggtgccagacaaataatgtgcgtattttacgccccggacatgcctgcctccagtcgttaatggcgacaaacgggataagtgaccgaaatcacacttaaaaatgatccaaaacaaaaagcacctactttgggtaacaggtacccgggcaaatttgccaactggatcgcgtttcttagatcacaattgaaaaaacttataaacaaacttgcaacatatcatctggtcagacctatactcagcgcactggtctgatttctctgtcgtaaagcagaccctacacttcgcgctcctgttacagcatgtaacattgtttaaataaaaataactctatgaggttatgggcatgagccagaaaacccgccttacccaatctgcccttgcagtggctgtagcactcgtttcaacccaggcctggtcagcaggctttcagctaaacgaattctcttcatcgggccttggtcgcgcctattcaggtgaaggcgctattgctgatgatgcgggaaacgccagtcgtaacccggcgttaatcatgatgttcgaccgtccaaccttctccggcggcgctattttcgtcgatcctgatgtcaacgtcaccggtagttcagttatcggtaatgacgccagccaggacaatattgcgcctaccgcatgggtgccaaatctgcacttcgtggcgccgattaacgaccagttcggttggggagcttccctgacctctaactatggtttagccaccgagttcaacaacgattttgccgcgggctcgatgggcggtaccaccgatctcgaaacgctcaacctgaacctgagcggcgcttatcgtctcaacgaccactggagttttggtctgggctttgacgccgtgtacgctcgagcaaaattagagcgctatgcgggtgatttaccggaaattatcggcgcacagctaccgggaatggtgaaagccggcaaactctccccggctcaggctgcggccatcggtcaacaggccggcggtatcagccgcgacacccaaattgctcgtctgaagggtgatgaatggggctttggctggaatgccggtattttatatgaagtcgataaaaacaaccgctacggcttaacctaccgctctgaagtcaaagttgattttgacggggattacaagagcagcctgccgtcttccctcaaccccatcaactccgctctgggcctgggcctgccgtacggcaccggcggctccacgattggcggttctctgacgttgaatctgccagaaatgtgggaagtatcaggttataaccgcgtggcgccaaaatgggccgttcactacagccttgcctataccagctggagccagttccaggagctgaaagcgaccaaaaccagcggtggtgaaacgctgttctacaaggacgaaggttttaaagattcctaccgtatcgcgctgggtacgacctattaccacgacgataactggaccttccgtaccggtatcgcctttgatgatagcccggtcccggcttccaatcgctctatctctattccggaccaggatcgcctgtggctcagcgccggtacgacttacgcctttaataaagatgcctcagtcgacgtcggtgtgtcttatatgcacggtcagcacgttgaatttacagaagggccgtatacctttaaatcagaaggtaaagcctggctgtacggcgcgaacttcaactaccgtttctgataatgtgaaaccacaaaaaagggtgaacatgatgttcaccctttttactttctacccgtcggttactgtgaatcgatatctttgagatcgccctcaatcgcctgcgcgttcgggttttcattcggggaaagtttaccgccgttggcgataaagtcgtgacgctggaagtaggcttcacgcattaaaatatacggatcggaggactgacggagcaagccgtctgaatccagcagctgcgcgcgcgtttcaacgccctcaaccatccatttgccgatagacatcggccatgtcagccaggaaagaaccggatacaggtcatcagccatatcgccaccctcatcacgcagggtgaagctgccgtagaaaggcaactgcacatatggaccatagccaacgccatagtgacccagcgtgctaccgaagcgggcaggctcaacgcgctgtagtttcggattcgccatcccggccacatcaaccaggccacccatcccaaggatggtgttcaggaagaaacgcgtaaagtgcaccattcctttatagggatcgcctttcaggaaggagttcaccattaccgccggctcttcgaggttgctggtaaaattactcagcccgttacgcgccggctgcggaacgtaatcacgccacgccaccgcgacggggcgaaggacatagggatcgacaacgttgaagttgaagttgaacatggtacggttaaagccttcaagcggatctgaacgcccctgcggccgatcgccagaactcgaactggcgcatcccaccagcaatgtggcgccaagcgcaagcgccgacaggcgaaaattcataggtgtctccctgttaatttaagctatcgctgggggttatcgggggacagctgcctccataaagatatcgcccgtaagcatgtgcctgctttcagcatagccttttttagcatcattgttggtgtcccgattctatacacattttgcaatttccgtattgctaatcttgtcattgtgaagaatttaggagcttatccgacccgaacagccgaaaccgctctaggattataataaagacccgccgttgaggaaaagttatgaaaccgcaaactcaccatgataatgaggatgttgaagtagagagtgaagaaaagcagaatggtgaagaaattgaggttgatgaagaacgcctgccttcacaggcgatggccactcatgaagtaattcgccaggagggcgagaaagagctcgaacgcgatgccatggcgctattatggtcagcgattgccgccggactttcgatgggcgcctcgctggtcgccaaggcatcttccatgtccacctgagcgaacttcccggcggcttcttgctggaaaatcttggttatacctttggttttgtgatcgtcattctcgctcgccaacagctgtttaccgagaacaccgtcaccgccgtcctgcctattatgcataaacccactccaggcaacatcggcctgctgttacgtttatgggggattgtgctggcaggtaacttaatcgggaccgctatcgcggcctgggcgttcgatgttatgcctgtgttcgatgagcccactcgcgaagcctttcttaaaattagcctgaaggtcatgcaaaacccgccgctggagatgtttgccaatgcaattatctccggttggctggtcgccaccatggtgtggatgtttcctgccgcaggttctgcaaagattgtcgtcatcattctgatgacctggcttatcgccctcgcggacaccacgcatattgtggttggcagcgtcgagattttctacctggtatttaacgggacgctaccgtggcaggaatttatctggccttttgctctgccaacgcttgccggcaacatatgcggcgggacctttattttcgctttactaagccatgcccagattcgcaatgacatgagtcatgagaagaaagctcgtgcagccgaggaggccaaaaagcgctaaatggctatagattaagcagttggcctgtacaagcttaacgagcgccgaaaataacgctataatcccggcgcttcgtccccttagttaaatggatataacgagcccctcctaagggctagttgcaggttcgattcctgcaggggacacttttgaattattcacctccgttcacagcattcgtttaatcatcaccaccgcagaacaacgccagccccgaagcagatgaatcacagaggtttatcgattcctgcatagatctcatcaagttgctgtagccggtcttcgtatgatttcgtcaaacaacggctgtcgctgccgcatttctgccggctatggagccatgttttttgtgcatccatcatctcgccacgcgtccccattggaaaaagcccccgcagaaactcatacttcgtcgccatcaccacgtccatatcgttcaggctccggttagcgcagatagccttttcatccgcctgcgtcgctttctgacaatcaaaactcgcggaataccccgctatcggatacagcacagcaatagtcatcagtacttctcttatcttcatacgcgctccatttccgcactcccgccatttgtgctacccgtttataacgagtgcccctcgctacgaagcccagcgtaagcttttgacacactgacgctctgaactatccgtgctgtcgataattatagttaatccaccttaaggctcccattgggttagccgcgcgccttccgcaaaatcttttttcccgacgataaaacgccccacagcctggctgaagtatcggtcagaattgcatcaacgcgggtcacggtatcgcttgccagagagggaaaaaatttttctaccgtaacgcttttcataattatgtctggcctgatattccatatataaattcaattccatttaaaatcaattacatatattaaattttaacattcacagtagttatcattgttgattgtttccctgcgttacgattcgcaaaacaatgccggtagataaatccctgacgtcacgtattcttcccgctgccggatgcgctgaactgctgttctttcagtatcagcgttgcttaaaagcagcgcgtccggcggtttatggcggatgaaaagctatcttctcagccatccgcttcatattgcggcaggatgtctgcgacaagaatcgggttctgtacgggacttgcggacagcctgttgccttacctaaattggttatacggatagatatgatgaaaaaactcgcaatggcactgggtatctgtgcgcttatggcttgtggcgctgccagcgcggcaaatggtcaggtcgtttcaaaagctaagtcagcctgccagaataacgcgacgcagtgcgcccaggcaaagtccacggcaaaagcggatgcgcagaaagaagcaaaagcagccaaagacgcctgtgctaaaaaccaggcagcctgcgacaacgcaaaaactgcggccaaaaacgcagtgaaaaagtaaaaacagtacggtgggggtataaccccaccgtactttcacaaatatgctccgcacagtacgcaagcccgattccagcaagggaaattctgttttgcttatgacagatatagcaggattctttgcacacgagcccgcatcaaaacaagcattgacacgatacaggcctgacccatggcgatccctcttctgtccgttcaccagccgcatcgtctatccgaggattttcaagcaggttccgctttcgatgaatcatcagccttttgactcaatatcgcctcctgcattattagtaatttcatataattattggaaattcaatgcaccaacaaaataattaaaagtcattaattcatcacaaggataatgagtactgcggatttttttagccgcgatacatttaattattacaggaaagctgataagatgcattagagataatattctgaccagattcaacatgacatgccaatatcaaagtttgatataaaacatctgttttgataaatattttgtatgaatctaaatcgtcgcaacgtcgatagaggtcaatttaggaaaaccataaccccctatttttcataagatgatatagaccatggaaagaaaagaaagaaacatatggaaactaaacaatctcccccccctggaatactgttcaatatctcgcgctaaaaaattattgaattgtgaaatagaagatctgcttcattggcatgatattggcgcgataagcctgtgcataaaagtaggtaaaattaacggaacattaaaaggtgcgttccaacatgaccagagcagtaataatctctattttcttaacgcacccaatgttgatgaattgagtatcagcgaaagatcttggtcacggcattccaaaattaacaaaatttttaaatttaatgatagtgaagcaaatcaggaagcccaatatggtatgccgattacccagctgaaactccgggtttccgtctccgggttatggtactgccacacaagaaatttaatggagatcttagaaacgcctgatggcatgattaccgaggagaggataagcatcatatcaccggccaccaatgtcctcttctgtcacttcataccggacgaggatgagagaccaaccatcacgctgagtaagctttacatcacaagtcaggcgattgagaaaatttatgaacataccatcagcagtcgccctctcgaactttctgaaaaagccttagatttacctgaggagcaagatatggtgacaccctcaacgattatgcaaaataagttgctcattgaatttatcaatcacatcatccaatccaatccacattttggcgataacatgcttaacgcgactgaaaacaaaaaaataaaatatttaatagggctatggataaactcaggtctgaaggcgtggtttccagctacggcagcattaatcttccgacgtcagaatatacgttcgaatgatacttctttaatttaattatatcagaatgaatcatttcagcgctataggtacagggcgcgcaacgcagtagcaaatgtgaaatgcatttcaatatgaattcatatatacatctgacttcacaataaaactgttctctataaacgctcctgatgtttatgaatcacttcatatacagcgaatcaacatgacgttaagtctccgccagtggattcctgaaaaccctgccctgcgctcaatattgacgcagcctgatgtgccattggtataaactctcgggtcgcggcgctttgccaggccccctttcgctgtatcaaacacgcggttctttccagtaatgatggcacgagttcgatcgcggttaaatcgtcacgcccctgaacaatagcagcaggaagcaaggttgccaacgacgtgcgttcaaccacggtcagcactgcgctaatcgagttggcctccatctgcactttcggttgaataccgcgctgtcggcagtcgcgatcgatttgttcgcgagtagcaaaagcgcagcttagcagaatcagtgacgcctgattgagcgccgtcagcgccacacgacgggtcgccgccagaggatgagagcggccaaccaccagcgccagggtttcagagagcagcggctgagacacaatatcccgcgaatcgctaccgtcgaaagcgatcccgatatccagctcatcattgagcagcagagtctccattcgatcctgcgccagctcttgtatatccagcgttatattcgggtaacgttgataaaacgaagccaccagcggccccataaaataatgggtaaaggttggcatcatcgccacacgtaaggtgccgcgctgcaaatcgtcaacatcatggagcgcgcgctgcccctcggccagttcccgtaaagcccggcgcgcataaattaaccagaccttgccggcgtccgtcaggcaagtgttgcgcccgctgcgatcaaaaagccgtactcccagcgtctcttccagctgtcgaatctgctgcgacaaagccggctgtgaaacatgcaggatggctgccgctcgcgtaaagccgccgtgttcagcaacggcaatgaagtagttgaggtgtcgcggcagcatgaattcatccataagaaattcaaatgaactcaatcataattaagtattttaacttatgaaataagttacgtactctgctcgcgattctttaccaaacgccacaggagatcggcatgagttgcctcaataccttccccacagcgaaacaaacgccggctactcaacgatgaacctgacgcaacgtaatggcacgatgctgctggtgctggtgcttatcggtatcaatatgcgtccgctgctgacctccgttggaccgctccttctgcagatccagcaggcaagcggcatgagcttcacgcttgcctctctgctcaccgcgctaccggtgatcgccatgggtctgctggcgctagccggcggctggattaaccgtcatttcagcgagcgtcaaagtatctccctcagcctgttaacgatcgtcgccggggctttacttcgcgaactggcgccgcagagcgcgctattactcagcagcgcgctccttggcggaatcggcattggtattattcaggcgcttattcccgcggtgataaagcgtctttttcatcgtcggacgccgcaggtgatgggggtctggtccgcggcgctgatgggcggcggcggcctgggcgccgcattcacgccgtggctggcgcagcatagcgctatctggtatcacgcgcttgcgtggtgggcgttacccgccgccgccgcgctcctctgctggtggccgctaagccgaacgttacccgcccggacgccatcaacaacccgggtcacgctttttcgccatcgtcgcgcgtggacgcttagcctctattttggtttgatcaacggcggctatgccagcctgattgcctggctgccgccttactatatgcagtcgggctacagcgcgcagttcagcggtaccctgctggcgttaatgaccatcggccagaccggcggagcgctcctgctgcccatcctggccagacatgaggatcgacgaacgcttctgatgctggcattggccttacagcttgtcggcttctgcggttttatctggctaccgcagcaggtaccgcttgtctgggccatctgctgcggtattgggcttggcggcgcatttccgctgtgtctggtcctggcgctcgatcacgccaggcaccccgccattgcgggccgactggtcgcgtttatgcagggagtgggctttattgtcgccgggctttccccctggctgtcgggactgctgcggagtttaagcggcaattaccagctcgactggatgcttcacgccgcctgcgtcctggccttaatggccataacgctgcgtttcgctcccgcacgctacccgcaagagtggcaacatcaggattcagccgctcgctaaacccgttatctcctcatgcgggatagttaactcctcccgcattcaggcagaaaaaagcacaaaatcaaacaactatatcagtacaaaaactgttgttaatgaccgtcgccagaatgaaatttaataccgaatgaaattaatgtgtcgccgaatcacgacactcgtaagtaactaaaaattaataaaaaaatggctcttgtttccctcattttttaggcgtacattagcgccatctggagccgtttacgctcagaatttacagctaccgcccgctgataaagcgtcgttttcgtgagcgatagctgagcaggcaatgaagagcaaattcatttaaggcgtctcgccgagagcgcggagtgatgagtcgtgaaatatttcttaatgggcatttcttttatggtcatcgtttgggccggtactttcgccctgatgatctagctttaacggtgttaaaaaaaggagcctttcggctcctttttttattcgtgactttcgctggtcaacttagccgacgcgggaagcagcccgtcggcacggaacatcgattttatgccccgcaccgcctggcggatacgatcgcggttctcaattaacgcgaagcgtacatgggtatcgccatagtctccaaagccaatgcccggagaaacgcagacttttgcatcctgcagcagctttttagcaaactccagtgagcccatcgccgcatactgctctgggatcttcgcccagacatacattgacgccttcggacattccaccatccatccggcctcatgcaaccctttcaccagcacatcgcgacgacgtttatactgctcggcaatgtcgcgaacgcactgctgatcgccttcaagcgcggcaatcgccgcaacctgtagaggggtgaaagtgccgtaatcgtgatagcttttaatgcgcgccagcgcattaaccaacgttttgttaccgaccataaagccgatacgccagcccgccatattatagcttttagagagcgtaaagaattcgacggcgacatcgcgcgcgccggggacctgcatgatagagggcgctttccagccatcgtaaacaatatcggcataggccagatcgtgcaccaccagcacgtcataacgcttcgccagcgccacgactttctcaaagaactccagttcgacgcactgtgcggtcgggttggaggggaaaccgaggatcatcattttcggcttcgggtaactctcacgaatcgcgcgctcaagctcgttgaagaaatccacgccttcgaccagaggtaccgaacgtacctgggctccggcaatcaccgcaccgtaaatatggatgggatagctgggatttggcaccagtacggtatcgccatggtcaagcgtcgccagcatcagatgcgcgagcccctcttttgaaccaatggtgactatcgcttctgattccggatcgatctcaacgttatagcgctcttgataccagcgagaaatcgcccggcgcaggcgcggaatgccgcgggaagtagaatagccgtgggtatcgggacgctgggcaacggtgcagagtttctcaacgatatgcggcggagtggcgccatcggggttacccatgctgaaatcaataatatcttcgccgcggcgtcgcgcagccatttttagttcagcagtgatattaaaaacgtaaggggggagacgatcgatacgcgtaaaacggcgttcaggactgaattcagccatagattcctcggattaacgttagcgcccggaccgtccgagcgacgctgctgcctgtgcagcacgtttagaaaataacccgaaaattttcctgctgtcgagaggggcagagaaaaataatttctggcgataaaaacgggcatcagtacgactaaatacggcagcaacgttctttcccctcctcgcctactacatcaaaattaacatgctgatatctttaattttacttaaatgcttgctcatccgtagacgctattgaatcgcgggtgtttgttattaatccccttttatttgtaagacttttccctattcatgccttcagctggccttctgccacgaggttttctatcatgttgctttctcgcgattaacacggcgcacacatgcacgaaatatttactatgctgctggcggtttttgaccgcgcggcattaatgctgatttgtctctttttcctcattcgcctgcgcctgtttcgtgaacttctgcataaatccgcgcacacccctaaagaattgctggccgttaccgcgatcttctctctctttgccctctttagcacctggtcaggcgtaccggtcgagggatcgctggtcaacgtgcgtattatcgcggtcatgtccggcgggatcctgttcggcccgtgggttggggctattgtcggcgcgatcgccggcgtacatcgctacctgattgatattgatggcgtcaccgccgtcccctgctttattaccagcattgtcgccggtctgctctctggttttattggtcgtaaagtgccgaaagcccagcgctggaaagcggggatcctcgccgggatgctatgcgaaaccttaaccatgattctcgtgatcgtgtgggcgccttcattcgcgctggggatagacatcgtgtctaagattggtattccgatgatccttggcagcgtatgtatcggctttatcgttttgctggtgcagagcgttgagggggaaaaggaagccagcgccgcccgtcaggcaaaactggcgctcgacatcgccaacaaaacgctcccgctatttcgccacgtcaacagcgagtccctgcgtcaggtatgcgacattatccgccgcgatatcagtgccgatgccgtcgcgattaccaatacccaacacgtgatggcctacgtcggcgtcggggaaatcaactaccgcgataacgatgactttatcagcccgacgacgcaacaggcgatccgctatggaaaaatcattattaaaaacaatgatgaggctcatcggacgccggaaatacactctatgctggtcattccgctgtgggaaaaaggcgtcgtcaccggtacgctaaaaatctattactgccacgcgcaccgcatcacctcctcattgcaggaaatggcggtaggcctgtcgcaaatcatctctacgcagctggaggtttcccgcgctgaacagctgcgtgaaatggccaataaagccgagctgcgggcgctgcaaagcaaaatcaatccccatttcttatttaatgcgctgaacgccatttcatcgtcgattcgcatgaatccggacaccgcgcgtcagttaatttttaatttgtcgcgctatttacgctacaacattgaattaaaagatgatgaacagatagatatcaaaagggagctgtatcaaatcaaggattacatcgcgattgaacaggctcgcttcggcgacaagctgacggtgatttatgatattgatgatgaagtcagctttatgatccccagcctgctaattcagccgctggtggagaatgctatcgtccacgggattcagccctgcaaaggaaaaggcgtggtgaccattggcatcaatgagtgcgggaatcgggtacgaattagcgttcgcgatacggggaacggtatcgaccctgcggtggtagcgagggtagaggctgacgaaatgccgggaaataaaatcggtttactcaatgttcatcaccgggtcaagctactgtacggggaaggactgcatatccgacgcctgacgccggggaccgaaattgccttctatgtgccaacccaacacgcgccccaggtggctacggagtcgctgctgtcatgagcggagataaaatgaaggtcatcattgtggaagatgagttcctcgcgcagcaagagctcacctggttgattaacacccatagcgaaatggagattgttggcacctttgacgacggtctggatgtgctgaagtttttacagcacaacaaagtcgacgccatttttctcgatatcaatattccatctctggatggcgtactgctggcgcaaaacatcagccagttcgcgcataagccctttatcgtttttattaccgcgtggaaagagcatgcggtggaagcctttgagctggaggcgtttgattatattctcaagccctaccaggaatcgcgcattatcaacatgctgcaaaagctgaccggcgcctggcagcaacagcagcaggtcagcgccggtagcggggcagcggccaatccagccagggaaaacgacacgattaatctggttaaagatgaacggattatcgtcaccagcatccacgatatttactacgcggaagcgcatgaaaagatgacgttcgtttatacccgcaaggagtccttcgtgatgccgatgaatatcacggagttctgcaacaagctaccgacggcgcactttttccgctgtcaccgctcgtactgcgtcaacctgagcaaaattcgcgaaatcgaaccctggttcaacaacacctatattctgcggctacgcgaccttgagtttcaggttccggtaagccgcagcaaggtgaaagagtttcgccagctcatgcatctgtagaggatttacccgaataatcattttattcgggtaagagacggggcttacagaatctgtcccagagtctgacgcaagtgcgcgccggagcccagcagtcccggattgtcgtggacaatcagatagaccggaatatcctggacgaaggctttaaatcggcctttatcttcaaaaccgccgcgaaagccggaggctttgaagaattcaaggaagcgcggcacgataccgccagcaatatacacgccgccaaaggtgccgagggtcagcgccaggttaccgccaaatcggcccataatgacgcaaaacagcgacagcgcgcggcggcaatcgatgcaggtatcggccagcgcgcgttcggtcacatctttaggctgcagattttccggtagacgcccgtcagacttcacgatcgcatggtaaagattgaccaaccccggtccagataagacgcgttcagcggagacgtgccccagctcgctgcgcagctcttcgagaataatgccttcctcttcgctattaggggcgaaatccacatggccgccctcacccggcaggctcacccagcgcttatcaacgtgtaccagatgagcaacgcccagcccggtaccggcgccgtagacggcaatcggcttgccttccaccggttccgcgccgccaaactgaatcagatgttcagcttttagcatggggatcgccatcgataccgcggtaaaatcgttaatgatttccagatgcgagaaacccaggttctttttcatctcagcgatagaaaatgcccaggtgtggttggtcatcgccacccagtcaccggtaatcggacaggcgatggcaatacagccgtcttctacctggacgttatgctcttccagatagacctgaacaacggcttcaagactgggataatcgagcccggaataggtcttagcacgggagatctccccgcttgccagatcgcataacgccagacgagcattcgttccgccaacgtcccctactaaagcaaattttgtcattccgttacggctccgctaaagtcaaaatgattctttggcacactctaaattcatgacgtcctaacaacaacgaccaacgcataagcgccctttgtttagcgacctacgtcacagttaggctgtaatttatgaaattattgtgcggccgatcgtcaggccagctctttactttatcgtttcagcaccatttgcgccaacgaccttaacgcccccgggcaaagtagtgcgtcgaaaccttcagaaggatattttcatgctgcacccgcgcgccagaacgatgctgttgttatcaatacccgcaatcgtgattggtattgctgccagcctggtcttgattgtggcgatgaaaacggcagccatgctgcagaatattctctggagtagcctgcctggattgctgggcatgaacgccagcggccctttctggacgatagctatcctcaccggcaccggcatcgccgtgggtctggtcgtgcgttttagtcctggtcacgccggacccgatccggccaccgagtcactcattggcgcaccggtgagtcccggcgctctgcccggcctgctcgctgcgctgatcgtcggcctggcgggcggcgttagcctcgggccggagcatcctatcatggtgattaatatcgccctcacggtggcgcttggctcccgccttttcccgcgagtcagcgcgctggactggacgatcctggcgtcctccggcactatcggggcgctatttggcacgcctgttgccgcggcgctgatcttttcgcaaacgctgaacagcagtaacgatgtgccgctttgggaccgactcttcgcccccttacttgccgcggcggcgggctctctgaccaccgggctgtttttccaccccaacttttcgttacctattgcgcactacgagcggtggcagcttgtcgatatctttagcggggctatcgtgacgctgattgctattgccgtcggcatggttggcgtttggtgcttaccgcgcctgcacgcgctgatgcagcggctgaaaaatccgatcttaaccctcggtattggcggatttttattggggatcctgggcgtcgtcggcgggcatatcacgctgtttaaaggcctggatgaaatgcagcaattagccttcagccagacgttaaccgccagcgattacatgcttattgctttggtgaagctggcggcgctggtgctggcggccgcctgtggttttcgcggcggtcgaatttttccggcggtgttcgtcggcgtcgcgctaggcctgatgcttcacgcacacgtggatgccgtgccggcagccatcaccgtttcctgcgccatcctcggactgacgctggtagtgacgcgtgatggctggttgagcctgtttatggcagcggtcgtggtgcccgattccacgctgcttccgctgctgtgtatcgtcatgcttccggcctggctgctgctggccggtaaacccttgatgattgccaggaagcgtggagattaaacccggctgtttctctcttccagcgcctgagtgaccgtgcgcagaaagtcgggaatatccatttttggcagcatcacctccaccagcgtcagcctgtctgaggcgacgctgctattcatcgcttcctgcagttcgtgggtgcgcgtcactcgccagcatcgggaagggacatcgggcgcaaaagcgtcaggcaggcgattccagtcccagagcgcaatatcgttatagcgctgctcggggccgtgaattgcgcgctcgaccgtatagccttcgttattgagcaacaggatcagcgggcgctgcttgtctctgagcatcgaccccagctcctgaatagttaactgcgcagcgccatcgccaacaatcagcaccacccttctgtccgctgccgcgatttgcgccccgtaggctgccggaagggtaaagcctatcgatccccatagcggctggacaatcagcgttgcgtcagggggcagcttaagcgcggcggcgccaaaagcggccgtcccctgatcggcaaggataatatctcccgggcgcagctgtttctgcaccgtactccagaagtttttctgcgtcaggctcccctctggcgcgccgctgacgcccggcgcctgaacatttggcgcatgccattctgccgccaggctggcagagagttcgattaagacatccagcgccttttccatcggtacccggctaaaccagcgatcgccaacccgcacggcgaagggctggacttctatcgttttttcctgcggaaggtgttgggtgaaaccggcggtaatggtatcggtaaaacgcgtgccgacgcagataatggtatccgcgctttcaatggcatcgcgggtatcctctgtgctggctatcccgctgtaagtcccgacgaacccaggctgctgctcatcaaaaagccctttgcccatcagcatcgtggcgtaagcaaccggcaccttcgccacccactctcgcagagcgttttgtagcccatagcgctgggcgagaaaatccgccagcagcgatacgcgacggctgcttctgagcatccgctcggcgtgctcgcggaaccccgccagctggttctcgtcggcgggcagcgtgtgaataagcaagcggtgagctggcggggtggcctttgctttggccacatcggccggcagcatgagataaccggggcgatgctgggtcagcatttcactcagtacccggtctatttcatggcaggcatttcccgctgcgagcaccgcctgagagcaggtaatatgttcactcatacgcgaaaagtggctgaaatcaccgtcgccaagcgtatggtgcagcagctcgccgcgctgctgtgcgccggtacagggagcgccgacgatatgcaggaccggtacatgctcagcgtagctcccggcaacgccgttgagcgcgctcagttcaccgacgccataggtggtcaacagcgcgcccgcgcccttaatgcgcgcatagccatcggcggcataggcggcgtttagctcgttagcacagcctacccaccctaagctctgctgcgcgataacgctgtcgagaaactgtaaattgtaatcacccggtacgccaaacaagcggtctatgccgcaatctacgagacgatccagcagataatcgccaatggtataagtcggttgcatatccttactctcctctcgtgcaggtaagttgagtattgaataagcaggtgcgctgtccagattgcgctcaacaatggcggtggaaagcaaaatttacgccttcagggtgtgtactccgcggcaaacattctttagtgtaaacgtatacacaaccctgttttatctgcggaggaagtatggtttaccaggcaaacgccacgcgatatcaaacgatggagtaccgccgctgcggtcatagcggactaaagctaccggcgatttctcttgggctttggcacaattttggcgacgaaacgcgggtggaaaccagccgccagcttctgcgtcacgcattcgatctcggcatgactcattttgatttagccaacaactatgggccaccgccgggttcggcggagagtcattttggccgcatcctgaaagaggattttttgccctatcgcgatgaactgattatctccagtaaagccggttacaccatgtgggacggcccctatggcgactggggatcgcgcaagtacctgattgccagcctcgaccagagccttaagcgaatgggtctcgactatgtcgacatcttctaccatcaccgccccgatcccgaaacgccgctgcgggaaaccatgggcgcgctggaccacatcgtccgccaggggaaagcgctctacgtcggattatcgaattatccgctcgaacaggcccgggaagccgtcaatatccttaacgatctcggcacgccgtgtctgattcatcagcccaaatattcgatgtttgaacgctgggtcgaggaggggttactcgatttcctgcagagcgcgggggtgggaagtatagcgttttcaccgcttgcgggcggccagctcaccaaccgttacctgcacggtatccctgcagactcccgcgccgccagcggcagccggttcctgcaaccggagcagcttactgaaagcaagctggaaaagattagtcagttgaatacgctggccgaatcccgcgggcaaaagctctcacagatggcgctggcctgggtactgcgcgatgagaaagtgacgtcggtactgattggcgccagtaaaacttcgcagctcgacgatgcggttggcatgctggaaaaccgccatttcagcgccgaagaacgggccaccattgacgcgatccttgcggtgtaaattcattgttactttagcaaaaagtgctctcacttgcgatttaggagttcctccgatgcggcggggctttaccgccccgtaatatcaggttaacaggccgacaacggccccgatcgtgaaggagaagagtatgttcaggtcactgattttggctgcagtgcttctggcttcagcgccattggtcgctaacgctggtgaaatcaccctgttgccatcaataaaattacaaattggcgatcgcgacaattacggtaactactgggacggtggcggctggcgcgaccgtgattactggcgtcgacactatgagtggcgcgataaccgctggcgccgtcacgacaacggctggcatcgcggctgggataaaggtaaagcctacgaacgcggctatcgcgaaggctggaaagatcgcgatgaccgacgcggcggctgggggcgtgggccaggcggcggacgcggacatggccacggccatcattaatcgcaaaagggagccattcggctccctttttcatcgtcacgcttaactgaatatcgttccaataatcagccagccgttaagcagcacaacgaccgcaactatcccccaccccagcagttttacccaccgggaattggccaggtcgcccattaaccgggaatcgctggtgaatatcagcagcggcaccagcgcgagggcgataccaaaactcagcaatacctggctcatcaccagaatacgcgtgggatccagccccattaaaatgacgataaacgacggcagcatggtgatcgcccggcgaaaccacagcgggatatggaagcggataaagccctgcattaccacctgccctgccagggttcccacaaccgtggaggataaacccgccgctatcaggctcagaccaaagatggtagctgccgcgtggctcagtaagggctccagcgtcagataggcctgatcgaggtcggcaatcccggtgtggccgttaaagtggaaggcggcggcggcggtcgccatcatggccaggttaacaaaacccgcgatggtcatggcgatggcgacatcccagcgcgtggcgttatagcgctctttgcgcgtccccccgtgcaggtgctgagtgagcgatgagtgtaagtagataacatgcggcatgatggtcgcccccaataccccggcggcaagaaacaccgcttcgctggtcggcagtgaaggaacgatcatccctttcgccagcggtgccagcgcgggctgggagaagataagctcaacgacatacgctgcggcgacaaacaacagcagcccgcctatcactttttccagcggcttttgaccgcgacgctgcagcatcagaatcaggaacgtcgcaattccggtcaatacagcgccctgaagcaatgacacgccgagcaccagcttaaatccgatagccgcgccaataaactcggcaagatcggtcgccatagcgataatttcggcctgcacccagtagaaccacaccacaggacgcgggtagtggtcgcgaatttgctccgccagatttttaccggtggcgatgcccagcttcgccgacatcacctgaatcagcatcgccatcaggttagcccataccaccacccacagcagctggtagccaaagctggcgccggcctgaatgttggtggcgaagttacccggatcgatatagccaatggcagcaatgaacgccggccccatcagggcgagcttaatcttgcgcgctgcgcgaccgctgctattctcaacgcgactgttggtcattttctgcctctggaaatatagcctttgctatgttttatgctatcaaaatgcgaatgattatcaagttcatttggagcgatgataatgattgctgtgataggagagaacgatagcgggttggcaacggaaaaccggggaactgataaacgcttttaattaatcaccagaatagtacaaccgagcaacttttaaaacctttacgtaacataacaaaaatgcatggttgatcactatttttgccattagtcacatatccttgcaatagtgtgtgctggctctcgttttctttgcgcttgttacatagaatgtgcacagaaatttaacctgcctcatatttggagcaaatatggaccgcgtcctgcactttattctcgcgatcgtagtggtggccattctggccctgttggttagccacaaccgtaagcagattcgtattcgttatgtcattcagctgcttgtcattgaagtgctgctggcctggttcttcctgaactctgacattggtctgggttttgtgaagggcttctccgagatgtttgaaaaactcctcggtttcgccaacgaagggacaaacttcgtcttcggcaacatgaacgacaaaggcctggcgttcttcttcctgaaggttttgtgcccgatcgtctttatttctgcgctgattggtattttgcagcatattcgtattctgcctatcgtcattcgcgcgattggtaccgtgctgtccaaaatcaacggcatgggcaagctggaatcctttaacgctgtcagctcgctgattctgggccagtccgaaaacttcatcgcctataaagatattcttggcaagatgtcccgcaaccgcatgtacaccatggcggcgaccgcgatgtctacggtatccatgtctatcgtgggcgcgtacatgaccatgctgcagccgaaatatgtagttgcggcgctggtactgaacatgttcagcacctttatcgtgctgtcgctgattaacccgtatcgcgttgacgaaagcgaagaaaatctgcagatgtcaaacctgcatgaaggacagagcttcttcgagatgctgggtgaatacatcctggcgggctttaaagtggcaattatcgtggccgccatgctgattggttttatcgcgctgatttccgcgctgaacgccctgttcgccaccgtcaccggctggttcggctatagcatctccttccaggggatcctcggctatatcttctatccggttgcgtgggtgatgggcgtaccggcaggtgaagcgctgcaggtaggaagtattatggccaccaagctggtttctaacgaattcgtcgccatgatggatctgcagaaagttgccgccacgctctctccgcgtgcggaaggcatcatctctatcttcctggtctccttcgccaacttctcttctatcggtatcatcgccggcgcgattaaaggcctgaacgaagagcaaggtaacgtggtttcccgcttcggcctgaagctggtgtacggttctacgctggtgagcgtgctctctgcgtctatcgccgcgctggtactgtaattcgtcagcggtatcgcgaaagccgggcaagtcccggctttttcatgcccgcagttcgctcaacggcagcggcttacccaccagatacccctggagataatcgacgcctaactcgagaagcttttcccgctgctccggcgtttcaacgtattccgccaccactttcatcttcttaaccttagccatttcaataatggatttgaccataatggcgtccagcggatcggtctcgatatcacgcacgaagcagccgtcaattttcaggatatcggcccgcaggcttttcagacgctcgtagttagcgtagccggtaccaaagtcatcaatcgctataccgcaaccgaaatctcgcagcagctggatgttatgcatgctggtctcgacatcggaaaacgcctgctcttcggtaacttcaatcgttatcgcctccgccgacaggttatagcgtttaaacagcgcgatgatttgcgccgcgctatccttttgcatcagcgtatagggcagaaggttgacggagaaatgctgaccctgatggtgattgagcgaactaaacagcgtttccagcacctgcatatcaaaacgctggctcaggttaaactgcgcaatcagcgggataaaccgatcgggcgtaatgatggtattgccgcagcgcatacgactcagtatctcgtaatacccctctccggaggcgtcccggataggctgggcgtacagcaccagcccacgttcgttaagcgcctgcttaatcttcgccagcagccgtacctgttcgctcgtttgatcggaaatctgctcttgcgccgcgtccagcggtaatacgcgccgcgccgcgccggcctgctccgataaccagctaagctgaccaagcatcgggtgaagctcagattctatgccgcggtagccgccccacgatgcgccaaattccagatctaacgcctggttattccagctaaattttttatggttaagcgtggaaacaatatgacttaaccgcgcctctggctccggccccttcagtaccagcagtagctcgctgccggggagctgaaatattcgctcgccggcagctaatagcggctgtagcttccgggctatctgccgtttgctctccactctcatcatcatgccataatggcggctcaggaagtccagattctgaatgcgcaggctgctgatggccacagcaggattccgctgcaggtgactctccagcgcgcgcagattcggtaaaccggttagcggatcttcttccgcctgatcccgccatctgaacttcattctttcactgcgagcatagatatccgccatataaaacaggcagatagtgaaacaaatgagtaccgaaagaacaaacgacagtgaatattcagtttgtacgccgtgtaaaaaattctggttatacgccacgagtaaaaaggctgaaacggaccatgaaatgcgaatcagcgtatgccccaggcggctaataccaatgaagtataaaatgaaaataagcgggactaaataaccggcaataaaaacagaatcataaggcgtacacagcaccagtaatattgccgccagggccacaaaccaatacaacgtaaatacccgctgctcgcccgcccgccatgagtggcaaagattacgccagaatgctcgtgcataacgtggactgataatcatccgcaacggataataaaagaatgtcgtgaaaattaatgcggcgctaatcaggctttgtatatcgataatggtgtaaataaccgacatactgccgaaatagctggatattgccaacggaaaagcaaaaaaacgccccgccagatacatggtgaccttcaaaaggagcggtgcaaaaaaaccgccccaaaaaatcctcgcgcccatatgttttgccgtcagcccagcgcgccagcgccttccaagctgaaagcgaacaatcgcgcaggacaggaaaactgagaagagctggcaaaatagcaggatcagcgcctgggttagcgtcagatcgattatccaggcattagtgatcgcaaacgcgataatcaatggcgcaacggcgtagcggccaaaaataaaaagtacggaatacattaagctcagcggtagccatgccagataaatttgatttccgtcaataatggtttgtggggaaataaatcgggacagcggaattgcgataaagcagaccaggagcgccagcagagtttttttgatcttaatgttaagatgatcaagcattattgttaattaaaactccggctgcaataaatatattcaggcaacagatattatgttgcttaataaaggcaggcaagattttaaatagtgaaaaaatctgaaattacttaacgcagaggtttgctgacttattcagagaatgctttacatttcctccgccagacaaacaaaaaacccccgccgtagcgagggttccgaatttggtggagctaagcgggatcgaaccgctgacctcttgcatgccatgcaagcgctctcccagctgagctatagccccacaggacctctttacgaaccaaacctgatgggtgcaggtgttggtggagctaagcgggatcgaaccgctgacctcttgcatgccatgcaagcgctctcccagctgagctatagccccgtaacgtaaagcgtgtcgtgttgacgggcggcataatatgaattccttcgccaggtgtcaacggcaaaatcaatcccggctatttgatcgctgaaaaagcaggcaaacggctgacattgcgagccttatcgcagccagaagttaaacatgtcactctttcctttaaaaggatgctataacatgtgcaactaattcccacatatttactcaggaaatagtatgctcaaggaacgaatgacacctgaagaaatagcgcatctgactggcttcagtcggcaaacgattaacaaatgggtacgtaaagagggatggcaaacgtccccgcgccccggcgtacagggcggcaaagcgcgcctcgtacatgttaatgagcaggttcgcgagtttattcgcagcgcgcagcgcgtggccgaaaaccctgtcccctattccgcaacggataacgatctcgaatctctgctgcttaccctgtgtaaagagatgacgccgggagagcaaaagctgctgatgtcgctgctgctgcgtgaagggatcaccgggttactcaaccgactcggtattcgcgatcggtgaaagcatgatgaaacttaaagataaaatgaccccagcggagctcgccgagtgccttaacctcgcccggcaaaccataaaccgctgggccagagaacaaaaatggcggacggaaccgatccccggagtcaaaggcggacgcgctcgtcttatcgtcatcgacaggtcggtgatcgatttcctggcaaatatcccggcgctgcggcatctgaccatggataaccagctggcggaaccgcccgtcaaatactttgtgaacgatgcggacacaatctggcgccagattgtcgagaccatgcacctgatgaccccaactgagcagctgcacctgcgggattttcttgcgcgcgaggggatcagcgggtttctgtcccggcttggcattactgatgcgaagtaacgggcaaaaaaaacggcggggttcgctatccccgccgtttaacaatcgctgtatcaggatcaggattgctggctttcgcgctcagcaataaaggccagcgccttgttgatacgttctacgctacgtgatttaccgatcgcatggacggtcacatcaagcgccggagactgtcccgcaccggtcaccgcgacgcgcagcggcattcccacttttcccatccccacttccagctcatcggccgtcgcctgaatcgcatgatggacgttttccgccgtccagtcgcttatggcggctaatttgtcgcgcaccacttccagcggctgacgagcaacaggacgcagatgttttttcgccgcatcggcatcaaactcggcaaaatcttcatagaaatagcggcagctcgccgccatctctttaagggttttgcagcgctcgcccagcagcttcaccagctcagccagctgcgggccgttacgggtgtcgatattttcctgctcaatgtgccactgtaaatgcgttgccacgtactccggggccagcgagttgatatagtggtggttcagccactgcagcttttccgtattgaacgcgctcgccgatttgctcaccgcccccaggctgaacagtttaatcatctcttcgcgagagaaaatctcctggtcgccgctggaccatcccagacgcaccagatagttcagcagcgcttccggcagatagccgtcgtcgcgatactgcataacgctgaccgcaccgtggcgcttggacagtttcttaccgtcgtcgccgttaatcatcgagacgtgggcgtaaaccggcactggcgcattcagcgctttcaggatgttaatctggcgcggggtattgttgatatggtcttcgccgcgaataacgtgggtgatttccatatcccagtcgtcaaccacgacgcagaagttgtaggttggagaaccatcggtacggcggataatcagatcgtccagctcctggttgctgaattcgatcggaccgcggatctggtcgtcaaaaacaacggaaccctcttccgggttggcaaaacggacgacgcaaggttcgtcatcagcatgatgttcgtggccatggcggcagcgaccgtcgtagcggggcttctcgccttttgccatttgctcttcacgcagcgcttccagacgctctttagagcaatagcatttataggccgtgcccgctgccagcatttcatcaataacggcgttgtagcgatcaaaacgcttggtctggaagtacggaccctcgtcccattccaggctcagccagttcataccatccataatggcttcaatggcctccggcgtggagcgctcaagatcggtatcttcaatacgcagcacaaactcaccgccgtgattacgtgcaaaaagccaggaatagagagcagtacgcgcgccgccaacgtgcagatagcctgtcgggctgggcgcgaagcgagttttgattttcatgaagtggccttacgtttgataaaggtgccgacacgcggcagtgttcgttggattttatggaggaatattctaacaccgtgggctgattcctcaatgttgttaccgtttcaacgtcacgctttcccctttttgtttataaatcatgcgccacggatgacattgcgatcgttttgtttaattttacgacgaacaaacaaattatttagaaaaggcgttgactcattttcaactctccctataatgcgactccacacagcgggggtgattagctcagctgggagagcacctcccttacaaggagggggtcggcggttcgaacccgtcatcacccaccaactactttacgtagtctccgccgtgtagcaagaaattgagaagtgggtgattagctcagctgggagagcacctcccttacaaggagggggtcggcggttcgatcccgtcatcacccaccactttctcgccagctggatttcttgccgaaaaatgaagtaccgaagtgggtgattagctcagctgggagagcacctcccttacaaggagggggtcggcggttcgatcccgtcatcacccaccacttcgggtcgttagctcagttggtagagcagttgacttttaatcaattggtcgcaggttcgaatcctgcacgacccaccaatgtaaaaaagcgccctaaaggcgcttttttgctatctgcgatagacaaagccgacacgggccttcatcttgctatccggcactgaccatcaattcaccagcgccgcaatcagcttctccagcgcgggcgtcgcctgctgttggtcatagacgatatacaaatctgccggtatgcgttcttccagcggacgaaacaccacccccggccacgtcatttgcgcatagctatcagcgatgagcgtaatacctatccccatactgaccatcgccagaaccgtttgcggctccatcacttcacggataatcatcggcgagaatccggcgctctggcacacgcgctgcaaaaacgtccagtcggtatgtattgaaggcatggtgacaaaatattcgttacgcaacgccgcaagcgggatcgccttacgcgcggcaagcggatgctcttccggcatggccaccagaaaagaggattcgtgcaagcgcaggctggtaaatccaggagaaggcgctgtcgccatccgccagacgccagcgtccagctcgcgtcgttccagcatcgccatctgcatggcgggcatgttctcgcggaaaagcacctctacgttagggttctctttcaaaaaacgccgcatcaccggacgcatttttccccacatagccgtacctatcacgcccaactctacccgtcccgcctcaccccgcccaatctgttccacgcgcgccaacgcctgattcgcgctggaaagcagacgacgggactcctccatcaggatttttcctgcgtgggtcaacgctacgctgcgggagtggcgaacaaacagcagcgtgccaagctgctgctccaggtctttaatgtgaatgctgagcggaggttgcgacatgttcagacgggccgccgcacgaccaaaatgcagctcttcggcaacagccagaaaatagcgcaataacttcagatcgatacgatgcgtgcgttccatgggtcatgcgctcctgaggcataaagataatgcgcaaagttaccacactgcatcagaaaaaatgaaacggcggaacatgtgcccgccgcggaagaggattaatgcgtcagcgctttcttcattaacttctcaggttcatgtttatatttgaagaacgcggcaaaaataaccgccagcagcaatgaataggccgcgaacaccagccagatggtctgccactcttttacgccatcaacagagaagtaatccacggccatgccgctgagaaccgaacctacccatgcgccaacaccgttcaccatggtcataaacaacccctgcgcgctggcgcgaatatgcgcccccgcctcttgctctacgaacaccgatcctgaaatattaaaaaagtcgaatgcgcagccgtaaacgatcatcgacatcagcagcagaacaaaaccgaacggagacggatcgccaaaggcaaaaaagccaaagcgcagcgtccacgccagcatactcatcagcatgaccgttttaatgccaaagcgtttcagaaagaatggaatggtgagaataaaggcgacttccgccatctgcgaaaccgaaagcaaaatagagggatagcgtacgacaaagctgtcggcaaacgccgggttgcgggcgaaatcatgcagaaaggggttaccgaagacgttggttatttgcagtaccgccccgagcatcatcgcgaagaaaaagaaaatggccatccgcggatttttaaacaatacgaatgcatccagtcccagcctcgtggccaatgtggcgccaggtttcttctcggtcacagcaattttcggtagcgtaagcgcataaatcgccagtaataacgacgcggcagaggcgatatacagctgcgcgctgctcagctccagccccatcaggctcaccgtccacatggcgacaataaaaccaagagtgccaaatacgcgaacaggaggaaacgcggtcgccggatcctggccggactgtgccagacatgaataggagatgctattagacaacgagatagtcggcatataggccatcgcgttaatcagcattacccagaacatcgtctccggatcggtgacggtcgttgcataaagaagcacgcccgcgcagaccaggtggcagagcatataggcccgttctgcacgtagccatttatcggcaacgatccccataatggcgggcatgataatggccgccagccctttggaactatagacaatgccgacatttgccccggtgaaatgcagtgtgtttatcatgtaagaacccagggtgaccagccagctaccccagataaaatattgcaaaaacgacatgagttttaagcgagaggcgatacccatttttccgttccttgccattaaagtaagaccccgcaagcggggtcaatatttattattttttcaggccagtttgcgtaagaagccgcagatcaggttaataaagttctgccgggagagttcggccgctgccagggtttgcgcgtgagatagtttcacatcgccgaggccctcagccagattggtaatggctgagacggccaccactttcagctcgcaatggcgggcagcgatgacttccggcacgacggacatccccaccacatcgccgccgataatctgcatcatgcgaatctccgccgccgtttcaaaattcggcccgggataagagacaaatacgccttcagtcagcggaaacccctcctcctccgctacgcgctgcagaacggcgcggtaatccgcgtcataggcgttggccagggagaagaagcgttcgccgaagcgctcatcattcaggcccaccattggcgtacccggcatcgtgttaatatgatcgctgagcgccaccagacttcccggccccacttccggacgtaaagaaccggccgcgttagtacaaaacagcagttcacaccccagcagctttagcgtccggatggcatcagtcatcaccgtcatgccccgaccttcatagaagtgcccacgccctttcatgcaggcaacgggtacgccggccagatttccaagcaccagttcgccggcatggccgtgcacggtactcaccggaaagccgggcagcttctcgtaagatatcgccaccgcatcttcaatttgttccgccagcgccccgagacccgaccccaggataaaggccacccgcggcgtaaaatccggcttatatccgcgaataatatcggcgctataccagggattctgtgagaaaagcgtgtcgctcataagctgtccttaaaaactgaaagatcgataaagtgattggctaccatgctgttataacgatgctacgcaatcgattaccaatacagttttcccggacgtttgatattaaaaagctattgatttcatttctgatacaaggggtcgttttcgcgtaaggcggtcagctggccagcctgctgccgcaccacctcccacagcgcctctgcggctgtcgatagcgagcggtttttacgccgcgccagcatcagctggcgttccaccaccggggtgagccgcttcacctgcagatgacttccctgagggagcggcagcgctaacgcaggtaggatgctgatgcctatccccgactcaaccatcgggaatagcgtggccggatgaccgatttcctgcacgatatttgcggtaacggcgaatcccgcgagcgcggcgtcaatcagcggccggctacccgaagcataatcctgcaaaaccagccgctggtcatgcagcgcatgccagctcaccgcatcccttttagcgaaagggtgatcgcaacggcaaagcagcaggaaaggttcagcgagaaccgcctcacactgcaaatcggtcgcggcgccagggtcgataacaatgccaaaatcaacttctccctgacggatgctctccagcacccactgctgggggcgatcgtgcagaacaaaatctatctccggatagcgacggttgctgtaggcgatgcactgcgggatcagatgggcggaaatagtctggctggccgccacccgcacggttcccataagctgctgcccgacgcgcccggcctcacgcaacgtgccgtttaactcatccagcaggcgctcaagccgggccgccagctgctgtccggcttccgtgagcaccacttcgcgcgtcgttcggtcaagcaggcgtacgccggtctgatgttccagctctttcacgctgtggcttaccgctgactgactcaggccaatactctcccctgcccggctaaagcttttgacgcgagcaacggtcacaaaaaccttcaactgacgtagcgaataattcatctctttttttcatgaatagatgcaataaatcgattttatttctcaaactaaagaaagcacaatagcgacatcgattttcaggagcgtttatgaaatttttccgcattcttgatccattcaccctgacattagtcaccgtcgtcctgctggcctccttttttcctgcgcgcggcggatttgtccccttctttgaacatttaaccaccgccgccatcgcgctgcttttctttatgcacggcgccaagctctcccgtgaggcgatcgttgccgggggcagccactggcgtttacatctctgggtcatgtgcagcacgtttatcgtttttcccgtacttggcgtgctattcgcctggtgggcgcccgttaacgtcgatccggcgctctataccgggtttatttatctctgcattcttcccgccaccgtccagtcagccattgcgtttacctctctggcgggcggcaacgtggcggctgcggtatgctcggcttcggcctcaagcctgctggggatcttcatttcgccgctgctggtcggcctgttgatgaacctgcacggtgcgggggggagtctggagcaggttggcaaaatcatgctgcagctgctgctgccgtttgtgctgggacatctctctcgtccgtggattggcaactgggtggcaaaacataaaaagtggatctcgaaaaccgaccagacctccatcctgctggtggtctattcggcgttcagcgaggcggttgttaacggtatctggcacaaagtcggcgtcggttcgctgctgtttatcgttattgtcagcatggtgctgctggcgattatgattgcgattaacgtctttgtggcgcgcaggtgcgggtttaataaagcggatgaaattacgattgtcttttgcgggtcgaaaaagagcctggcgaacggcattccgatggccaacattctcttcccgacctctatcctggggataatggttctgccgctgatgatcttccatcagattcagcttatggtctgtgcggtgctggcgcggcgctataagcgccaggccgaagcgttacaggcgcaggagaaaagccgcgcctccgaagcctaacgcgggcgcttaaggggctcgaccaggctggtcagcccctccgttttaatcaatagcgttaatgccatcagctcgccaagatgcccggcgggaaattgatccttacgggcaaaccacagcaaatactcttccggcacatcgattaagcgccgccctttgtatttaccaaacggcatttccgtgttggcaatctcaataagctgatctttatccacgcgactctccgagcaaacgcagcatttcgtcttcatcgatcaccgcaattcccagctcctgcgctttggcaagcttagagcccgccgcctcaccggcgatgaccaggtcggtcttcttcgacacgctgcccgccaccttcgcccccagcgcaaccagccgggctttcgcatcgtcacgggagagctgactcaggctaccggtcagaaccaccgttttgccggcaaaggggctatcaatctcttccgcattgaccacgaccggcgccggccagcggacgccttctttacgcagctgagcaatcacttctcggttgctctcttcggcaaagaaattacgcacgtgcgtggcaaccacaatcccgacatcgggcactttttgcagatcgtcaattgaagcctgctccagcgcctcaatggtgccaaaatgggccgctaaaccggctgccgtcgcctcaccgacttcgcggatccccagcgcataaaggaaacgggcaaaggtggtctctttggacttctccagggcatccaccacgttctgcgctgatttgggccccatgcgatcgagcccggtgagtttacccggcgtcagttggaagagatcggccggcgtatgcacgtactctttttcgaccagctgatcgatgattttatcgcccataccgtcaacgtccagggcgcgacgggagacaaaatgcttgagcgcttctttacgctgggcgccgcagatcagaccgccggtacagcgcgtcaccacttcgccttccacgcgttcaacgtcggaatgacataccggacaatgggtggggaacacgatctcacgcgtctcctccgggcgttctgagagcacgacgttcacgacctgagggataacatcgccggcgcggcgaatgaccaccttatcgccgatacgcagccccagacgctcaatttcatcagcattatgcagcgtcgcgttgctgaccaggaccccggcgacgtgtaccggctccagacgcgcaaccggcgtgatggcgccagtgcgcccgacctgaaactcaacgtcgcgcacgaaagtcatctgttcctgcgccggaaacttaaacgccaccgcccagcgcggcgcgcgggctacgaagccaagctgttcctgcagcgccagcgaatcgaccttgatgaccacgccgtcgatatcaaaccccagcttcggccgatcctcttcaacctggcgatagtaagtaagcacttcctctggcgtatggcagagctttacacgctcgctgaccggcagcccccaggacttaaactgctgcaagcgcgccgagtggctggcaggcagctcgccgccttccagcacgcccacgccgtagcaaaagaaagtgagtggacgcttcgcggtaattcgcggatcgagctggcgtaaagaccccgccgccgcgttacgcgggttagcaaagactttacctccggttcgccgcgcctcttcattaattttttcaaaccctgcctgcggcaggaacacctctccgcgcacctcaagccgctgcggaatattgtcaccgcgtagcttcaggggaatcgcgcgaatggtacgcacgttggaggtaatatcttcgccggtcgttccatcgccgcgggtcgccgcctgcaccagcaggccgttttcatacaggatactgaccgccaggccatccagcttgagctcgcagcagtaagtcaggttatcggtatttttcaggcgatcctgtacccgcttgttgaacgcgaggaagctctcctcatcaaaaacgttgtccagcgacagcatcgggacttcatggcgaatctggctaaaagaggctaacggtgcggcaccgacgcgctgggtgggcgagtccggggtgatcagctcagggtactgagcttccagctcgcgcagttcgcgcattaaccgatcgtattccgcatcagggatttccggcgtatccatgacgtggtagagatattcatgatggcgaagcgtggttcgcagttcagtcagtttttgttcgttcgattccatatcacaccatcaatgataaaaaacccccgacgggcgggggttcaggataagtagatgaaacgcaagaagatgaatcaggcgttagcctctttcacttcacgaattcggtcttgatattcacgcaatttttgcggcgtcatcatacgacgctggtcatccagcactacgccgccgacttcatcggcaatgtactgcgcggactgcagcatcagcttaaagttttgcagttcatcgccaaaggacggaacctgcataaagatagtgaccccgggcgtcatcatatccgccatgctgtcaggattgaaggtgccaggcttaaccatattggccagactgaagagcacctgaccgctgccgtccgggctgaggtggcgatggaagatattcatatcgccaaatttgaagcctgcctgctggatgctattgatgagtagctcgccgttgagctgcgaaccgtgatgcgcagcgacgttcatcacgatgaccgtctccttacgctctttaggctgcggcgcggcctgctgcggctcaggggcctgaggttccggcgccggctgcggctctggagcggcggcaggttgttgaaccggctgctgcacatgctgaacgggctgctgcgcatgctgaacgggttgctgcacatgcggaacgggctgcggctgtaccggctgctgaggcggcacggcgcgctgcggctgctggaccggggcctgggcgtgaacgggctgatgttgcggcggctgcggtgcacggacaggctcttccgggcgcacaggtggctgttgcgcctgacgctcataaggaggctgatactggtgctgcggctgacgaggtgcttcatgctccccatgaacgccattcggcgcatgactggtccgatgaacccggacttcaccaacgccttcaacatcgtcatcaaagtcgtcgccttccgacgcttcatcgtcgcgagacttcatacgtttcagtgggcgatcgcgaaacatcgaggagcgttctttacggctggtccagaaaccgtgcaccagtaaagcgattatggcgatcgcgccaacaatgattaatatcagacgcaaatcctgcatcattatattctctgttgttctaacaccttgccaccacggcaaacatttactcactaagagtatttgccgattacatcaagtgcaagtgcgtcgggggctttcactacataaagatgaactaaatcgtgctttttgctgttttttcgaacatttcctaactggttattgtctgctaacccgataaaatagcccggcattcagcctggatgtcaaaaaaggagcattacctgactatggtttcatcatccgtaacgaccccgcgtagtggcgtctactatttttcgcagggttggaagctgatcgggctgccggggatccgtcgatacgtattcctccctttactcgtcaacattattctgatgggcggcgcattctggtggctgttcacgcgtctggacagctggatcccttcgttgatgagccatgttcctgaatggctgcaatggcttaactatctgctgtggcccatggtggtcatttctattctgcttgtcttcggctacttcttctcgacaatcgccaactggattgccgcgccctttagcggcctgctggccgagcagcttgaagcgcgcctgacgggcgcgacgccgccggatgtcggggttttcggcatcctgaaagatgttccgcgcatcatgaagcgcgagtggcagaagtttgcctggtacctaccgcgggccatcgtccttttgcttctctactttatccccggtatcggccagaccgtcgcccccgtgctgtggttcctgttcagcgcctggatgctggcgattcagtactgcgattacccttttgataaccataaggtgccgtttaaaacgatgcgtcaggcgctgcgcacgcgcaaagtgaccaatatgcagtttggcgccctgaccagcctgtttaccatgatcccggtgctaaacctggtcatcctgcccgtcgcgatttgcggcgcgacggcaatgtgggtcgattgctaccgtgacaaacacgccatgtggaagtagcgctatcgctttcggagcggcttatgccgctccttattacttctggcttgccattatttctcttctgaatatagatatgctaaatccttacttccgcatattctttaagcgggtatgctgaagccgtactcccaaatttcatacagttaaggacgggccatgagtaagatttttgaagataactccctgactatcggccatacgccgctggtacgactgaaccgcatcggtaacggacgcatcctggcaaaggtagaatctcgtaacccgagctttagcgtaaaatgccgtatcggtgccaatatgatttgggatgccgaaaaacgcggcgtgctgaagcccggcgttgagctggtggaaccgaccagcggtaataccggtatcgcgctggcctacgtggctgcggcgcgcggttataaactgacgctgacgatgccggagaccatgagcatcgaacgccgcaagctgctgaaggccctgggcgctaacctggtgctgaccgaaggcgccaaggggatgaaaggcgccatccagaaagccgaagaaattgtcgccagcaacccggaaaaattcctcctgctccagcagttcagcaacccggccaacccggaaattcatgaaaaaaccaccggcccggaaatctgggaagataccgatggtcaaatcgacatcttcatctccggcgtcggtactggcggtacgctgaccggcgtgagccgctatatcaaaggcaccaaaggtaaaaaagatctgattaccgttgccgttgaacctaccgactccccggttatcgcccaggcgctggcaggcgaagagctgaagccaggcccgcacaaaatccagggtattggcgcaggctttatcccaggcaacctggatttgaagctggtggataaagtagtggctattaccaatgaagaagccatttccaccgcccgtcgcctgatggaagaggaaggcattctggccggcatctcttccggcgctgccgttgccgctgcgctgaagctgcaggaggatgaagcctttaccaacaagaatattgtggttatcctaccctcttcaggtgagcgctatttaagcaccgcattgtttgccgatctcttcaccgagaaagaactgcaacagtaatgccagcttgttaatatcgtgtaaaaaagcaccttttcaggtgcttttttgtggcgcacatcaaacttttacccctcctggcattgattcacttcgttgggtctggtatttaaccagcacatttatttcgatgcgcgaaattattccgatttggatttccataagctgaatcgattttatgatttggttcaagtcttcctttagcggcataatgtttaatgacgtggtagacgttaacggcctgaaggtttccacagcgattttccgctgatggtgccggagccggatacgtgatgccggcgctaacgatacaggctaaagtttggccgttaggctaaactttaggtccacaacactaaacctataagttggggaaatataatgttccagcaagaagttactattaccgctccgaacggtctgcacacccgccctgctgctcagtttgttaaagaagcaaaaggcttcacttctgagatcactgtaacctccaacggcaaaagcgccagcgccaaaagcctgttcaaactgcagactctgggcctgacccagggtaccgttgtcactctctctgccgaaggcgaagacgagcaaaaagcagttgagcatctggtaaaactgatggctgaactcgagtaagttcacgggttctttttaatatcagtcacaagtaaggtagggttatgatttcaggcattttagcatccccgggtatcgctttcggcaaggcacttctgctgaaagaagatgaaattgtcatcgaccggaagaaaatttctgccgataaggttgatcaggaagttgaacgttttctgaatggccgcaccaaggcctccgcccagctggaggtcatcaaaaccaaagctggtgaaaccttcggtgaagaaaaagaagccatcttcgaagggcacatcatgctgctggaagatgaggagcttgagcaggaaatcatagccctgattaaagataagcatatgactgccgatgcggcagccaatgaagttatcgaaggtcaggctactgccctggaagaactggatgacgaatacctgaaagagcgtgccgctgacgtacgcgacatcggtaagcgcctgctgcgcaacatcctcggtctggccatcatcgatctgagcgcgattcaggatgaagttatcctggtagccgctgacctcaccccgtctgaaaccgcacagctgaacctgaacaaggtgctgggtttcatcaccgacgcgggcggccgtacttcccacacctccatcatggcgcgttcccttgaactgccggccatcgtgggcaccggtagcgtgactacccaggtgaaaaacggcgattatctggttctcgacgcggtgaataatcaggttctggttaacccgagcgatcaacaaatcgaagaactgcgcaacctgcaggctcaggtcgctgaagagaaagcggaactggctaagctgaaagacctgccggccattacgctggacggccatcaggttgaagtctgcgccaacatcggtaccgtacgcgacgttgaaggtgccgaacgtaacggcgcggaaggcgttggtttgtatcgtacagaattcctgttcatggaccgcgactcgctgccgactgaagaagaacagttcgcagcatacaaagccgttgccgaagcgtgcggctcgcaggcggttatcgttcgcaccatggacatcggcggcgacaaagagctgccgtacatgaacttcccgaaagaagagaacccgttcctcggctggcgcgcagtgcgcatcgccatggatcgcaaagagattctgcgcgaccaggttcgtgccatcctgcgcgcttccgctttcggtaaactgcgcatcatgttcccgatgatcatctctgttgaagaagtacgtgcactgaagaaagagatcgaaatctacaaacaggaactgcgcgacgaaggtaaggcttttgatgaggcaattgagattggcgtgatggtggaaaccccagccgctgcgacaattgcgcgtcacttagccaaagaagttgatttctttagtatcggtaccaatgatttaacgcagtatactctggcagttgaccgtggtaatgatatgatttcacatctttaccagccaatgtccccgtccgtgctgacgctgattaagcaagttattgatgcttctcatgctgaaggcaaatggactggcatgtgcggtgagcttgcgggcgatgaacgtgctacacttctgttgctgggtatgggtctggacgagttctctatgagcgccatttccatcccgcgcatcaagaagattatccgtaacacgaacttcgaagatgcgaaagtattagcagagcaggctcttgctcaaccgacaacggacgagttaatgacgctggttaacaagttcattgaagaaaaaacaatctgctaattcacgagatgcgcggcccaaattactgcttaggagaagatcatgggtttgttcgataaattgaaatctctggtttctgatgataaaaaagacaccggaactattgagattgttgccccgctctctggcgagatcgtcaacattgaagacgtgccggatgtagtttttgcggaaaaaattgtgggtgatggcattgctatcaaacctactggcaacaaaatggttgcgccggtagatggtaccatcggtaaaatttttgaaaccaaccatgctttttcaatcgaatctgatagcggcattgaactgttcgttcacttcggtattgataccgttgagctgaaaggcgaaggcttcaaacgtatcgccgaagaaggccagcgtgtgaaagtcggcgacccggttatcgaattcgatctgccgctgctggaagagaaagccaagtcaaccctgactccggttgttatctccaacatggacgagatcaaagagctgatcaaactgtccggtagcgtaaccgtgggtgaaacaccggttatccgcatcaagaagtaattcttgccgcagaagaatggcgcctctcgggcgccatttttttatctcgccgctttaaacggccgatagcacttctcccgcgaaagtattttcatcccttccgggccgctttccagaatccgcttctcgctgtcagaaacctgtaaatcacactgatatccgccaacggcgccaaataaagatcccacttcgcagacatcctcaagggcttcgctgccggtggtctcaaaatggccgacgactcttccctgctgacgcaccactaaacgatagctcttcattctccctccctatgcggcggaagaatgagctcatcgcagccctgttcattggtccaggtcataaccgccagcacccgctgcgcggcagcgtgggcggcctcgcccagcggcattccgcataccagaccgctcgccagctcggcgcaaaaaaggtcgcccgttcccttcagatcggtttcaacgcgcggatgttcaaccacctcgaccgactgcgcgctaaccaccagcacgttgatcgtggcgctattttctcccggcgcgctggtgataacgacccatttcagtgaatcagagagcagactacgggcggcaataatcgcctcctgctgattatggcaaggcagaccgcttagcgtctccagctcaaacagattgggcgtgatcccctgcgccagcgggagcaaatgcgtacgataggcttcagggatctcggccttgacgtaaataccgctatccacatcgccaatgacgggatcaacgagaatacacagttcaggatgctgctcgcgaatgcgcagcagccattgcgccagacgcttaatctgcacggcgctgcccatatagccggtcgttaccgcccgcagctcgcgcagggcgtcacgctcctccagcgcctttaaatagccggcaaaccactcttccgggataacgccgccatagtaagtatcatagtgcggcgtattgctgaacagcaccgtcggcaccgcgatgacccgcaggccgtgctgctttatagccggtatcgcaatactgttgcctacgctgccgtagaccacctgcgactgcacggccacaatatcgacctgaagcgcccgacttttatcgttgaagagcaccgattgtatttcatcttgctggcccatcctttctccccccgctggacagcgggtcatactctgattatcattcgtcctatgctaaaattcattttgtcataggtcaataatgatcgttggaaaaactgccagtgagatcttcgatagcatccgccatctggtacaaagcggcgtactcaagcctggcgatgttttaccgccggtccgcgagctggcgggcaagctgtcggttaaccgcaataccgtcgctgccgcctataagcgactggtgacctctggcctggctatcagccaggggcgtaatggtaccgccattaaaacccataataccctgcccgcccttgaaggtggcgatccctcttcgccgctgaaggatatctccagcggcaatcccgaccccgctcgcctggcaaacctcaagcactatctcggcgcaattgcgccagcgcctcgcctgtacggcgatgcggcggttgaaccacggctggccgcgtgggccagccgctgggttaacaacgatgtgaacctggatgccgatattaaccttgccagcggcgctgtcgatgcgcttgagcgcctgctgtgcgccctgctgctgcccggcgatagcgtggccatcgaagacccctgctttctcagcagcatcaatatgctgcgctacgccggttttagcccttcgccggtaccggtcgacggggaaggcatgcagcctggggcccttgaagaggcgctgagcaacggcgcccgggcggtcattattaccccgcgcgcgcacaatccgaccggctgtagcctcagcgaatcccgcgcccgggcaatacgcgaaatactggcccgctatccgcaggttctggtgattgttgacgaccatttcgcgctgctctccgccacgccctggtactcccctatcgccgcggaaagtcagcgttgggcgctggtacgctccctgtcaaaaaccctgggaccagatttgcgtctggccatcgtcgccagcgacgctgacacgtcggcggcgctgcgactgaggcttaattccggtagccaatgggtcagccatctgttgcaggatctggtcatcgcctgccttaacgacaacacctttatggcctctctggcggaaacccggcgccactatcgtcagcagcatgaaaagctgattgccgccctcgccagccgcggaatcacccatctgacgccgggagacggccttaatttttggttcccgctggaagagccgagccagccggtagcgctccgtctggcgcacgccggctggctggttcgcgaaggcgaaacgttcggcattcgcgccccttcgcacgggctgaggctgtcgcttgcgacgctcagcgacaatgaaatgaataagctcgccaatgacttataccagatattacaacaacagtgacgggagttaacgctatgcagatccactttatcgtccatgaagtctttgaagcgccgggagcttacctgcactgggcgcaggcgcgcggctacggtatcagctggtcgcgggtatacgcgggggacaggctaccggaaaacgccaacgcttttgatatgctggttgtgctcggcggtccgcagtcgccgcgcacgacattatctgagtgcccctggtttgatagccacgccgagcagcgtttgattgcgcaggccattgccgcaggacggatcgtggtagggatatgcctgggctcgcagcttatcggtgaagcgctgggcgcgccggtcatgcaaagtccggaaaaagaggtgggtcactatcccatcacgctcaccaccgcgggcctgcaggatgacaaactggcccattttggcccctcgctggtcgtcggccactggcataacgatatgccaggcctgaccccggaggcggaagtgatggcctccagcgaaggctgcccgcggcaaattgtgaaatacagcgaccgggtttatggcttccagtgccacatggagtttgatgctgaggtcattgagctgctgatcgcccattcgcagcaggagcttagcgccgccagaggcaggcgtttcattcgtagtgaacaggagatgcgtgcctgggattatcgcgaaatgaatgagaagctatgggcgtttcttgataagctgacggcaaagtaagcaaaaggcttttattaaagcccgacaatttaaggatcgccagaaatgcccaatcccaacccacagcttaaagccgccatcgaagcctgcgatcgcgctatctcccaggaggattacgcgacactgatggagtattacgctgatgacgccgcgctggtcgtcaagccaggcatggtggtgcggggcaaagaaaatatccgcaacgcgtttatcgccattgccgactatttccagcaccggctggtggtgacgcagggaaaaatggagattatcgaaggcggcggcaatgcgctggtgattatggaaacccggctggatatcccgacggcggaagccgggataacacaggtcacgcggcgcgcaacctatgtctttcgtcagcagggtgaacgctggctctgcaccgtggataactcctacggtacggacctgctcgacgcgcccgaggtttaaattcccgcgccctgggtaaagtgctcttcgccaaatacgccggtagaaaggtagcgatcgccgcgatcgcaaacgatcgccaccactaccgcgccaggattttcacccgccacacgtagcgcgcccgccaccgcgccgccggaactgacgccgcagaaaatcccctccttcaccgccagcatccgcatggtgttttcggcatcctgttgatggatatcgagcaccgcgtccaccagctgcgcgttaaaaatgcccggcatatattcggcaggccagcggcgaattccgggaatactgctcccctcttccggctgcagccccacgatgctcaccgctttatcctgctcgcgcagaaaacgcgatacgccggtaatggtgccggtggtacccatgctggagacaaaatgggtgatccgcccgtcggtctgctgccagatttccggcccggtagtggtgtagtgcgcgtacgggttgtccgggttgttgaactgatcgagcagcttgccttcgccgcgctgcgccatggctaacgctaagtcacgcgcgccttccattccctgctctttggtgaccagaatcagctccgcaccgtaggcgcgcatggcggcacggcgctcctggctcatgttgtccggcatcagcagcttcatctgatagcctttaagcgcggcgatcatcgccagcgcaatgccggtgttgccgctggtcgcttcaatcagcacatcaccgggtttaatctctccgcgcttttcggcctcgacaatcatcgacagggccgccctgtctttcaccgaccccgccggattgttgccttcaagtttgacccagatttcgctgccgttgtccggccccatgcgctgcagtttgaccagaggcgtgttgccgattgtttgttctaatgtattcacggttttgcccaataaaaagcccggtaagcattacgccaccgggcgaaaaacatacgcgataacctatcaggctgactcagccagagcaatatcctcgcgcgtctcaatgcgttccttcccgtgataaatacgggcatgctgcagaccgacaaacaggcgctctccccggtgcggcgggacgtcgtcgcgcatgaccacggtcagcggctcggtataccagcccagcggttgtaccaccaattgcgtgtagtgacctttagggctagcttccagcacctgcaccggcagcggtgaatcgaggctggttcggcggctcacgtcaacttcccacggacgcaggaacagatcgaccggcccctgatgcgcggaggtatagcccagcggccagcggtgcgcgcccacgtggaattgtccgccgcgaatggtgccctgcagacggttcacctcgcccataaattccagcacaaagcgggtcgccggttcgcgccagagctgctccggctcgtcaacctgctcaatgttgccctggctcatcactaccacgcggtcggcaacttccatcgcctcttcctgatcgtgggtgacgaagacgctggtgaacttcagctcttcatgcagctgacgcagccagcgacgcagctctttacgcacctgggcgtccagcgcgccgaagggttcatccagcagcagtatctgcggttcaacggctaacgcacgcgccagcgccacgcgctgcttctgcccgccggagagctgcgccggaaagcgatccgccagatgcgcaagctgtaccatctccagcagtttggtcactttcgctttgatggccgccgcattcgggcgctcgcggcgcggcagcacggtcaggccaaacgcaatattgtcgaatacgttcatatggcggaacagcgcgtaatgctggaatacaaagcccaccttacgatcccgggcatgcagacggctcacgtcggtgccatgaaagcggatgtgcccgctggtctgatgctcaagcccggcgataatacgcagcagcgtggttttaccggagccagacggcccgagcagcgccaccatttgtccggaagggatatccagcgagatatcattcagcacctgggtgcgaccaaaagacttcttaatattggcaatctcaatgctcatgatttccctcctgatgctgacgtttttcctgattttctaaacgccactgcaccacactcttcaaaaacagggtcaaaatagccatcagcgtcagcaacgcggcggcagtaaaggagccgacagtattgtagtcctgctccagcagttcaatctgtagcggcagcgacagggtttcaccgcgaatagagccggagacgacagaaacggcgccaaactcgccaatcgcgcgggcgttggtcagcaccacgccgtaaagcagcgcccagcggatattcggcagcgtgacgcggcggaacatctgccagcctgacgcgcccagcagcaccgccgcttcgtcttcgttgctcccctggcttaacatcaccggcaccagctcgcgcaccacaaacgggcaggtcacaaagaccgtcaccagcaccatgcccggccaggcgaacatgatctgcaggttgtgctcatccagccagccgcccagcggcccgttggagccgtaaaagagcagatacaccaggcccgctaccaccggcgacacggcaaaaggaatatccagcagggtcagcagcagctgacgtcccgggaagttaaagcgcgtcaccagccacgccagcagcgtgccgaacaccaggttcaccggcacggtgatcagcgcaatcagcacggtcagccagatggcgtgcagcatatccgggttcgccaggttttccagcgcgggcatcagccccttgctgaaggcctgaacgaagatatacaccgtcggcacgacgagaataaacgcggaaaccagcacgcccgcaccgatcagaaaccatttaccccagttgatgcggggcgcatcgtatcgtttcaattgcgtaacttccgccatcagtgacctaccacacgtcgaccaaagcgactttgcagagtgttaatcgagtacagcagcagcagcgaggccgcgaggatcaccgaagcaatcgcgctcgccgccgggtaatcaaactcctgcaaacggataaaaatcatcagcgaggtcacttccgttttccacgcaatgttgccggctataaaaatcaccgcgccgaactcaccgaggctgcgggtaaaggacagcgcaacgcccgccatcagcgccggggagagctccggcagcaccaccttgcgaaagctctgccagcgcgtggcgcccagggtttccgccgcctcttcatattccggacccaactcttccagcaccggctgcacggtacgcaccacaaacgggatgctggtaaaggccatggccaccgcgataccgagccaggtataggtgactttaatatcaaatttcgccagccactcgccgtacaacccgttcacggagaagagcgaggcgagggttaagccggcaacggccgtcggcagcgcaaacggcaaatccatcagcgcatcaagcagcgtgcggcccgggaagcggtagcgggttaagatccacgccatcagcaggccgaacacgccgttaaaaatggaggcgacaaacgccgacagcagcgtcactttataggccgccaccacctgcgggttggtcactacgtcccagtactgcgcccagctcatctgggcaagctgcatcaccagcgcgctgagcggcaacaacaggatcaggcagacgaacagcaggctggtcccgaggcttaaggtaaagcccggcagcacgcgtttagtcgatactgcaaacattacttacgccccgccgccagcagtttgtccagctcaccgccgctggcaaaatgggttttcatcacatcaggccaggagccaaatttatcttccacgcggaacagttcggtctgcgggaatttatctttcagtttgttcatcacgtccgggttattcacgcggtagtagtaatcggtaatgatggtctgcgcctgcgggctgtacaggtagttgagataggcttttgccgctttctcggtaccgttggcctggacgtttttatccacccacgccaccgggaactcggccaggatgttggttttcgggataaccacctcaaagccctgcgcttcatactgtttgcggatgttattcacttccgattcgaagctgatcagcacatcgcccaggccgcgctcggcgaaggtcgtggtagccccgcgaccgccggtatcaaacacttcgacgtttttcaggaactgggtcatgaactgctcggttttcgctttatcgccgccgtcagccttgtccgccgcgccccacgccgctaaataagtgtaacgcgcgttgccggaggtttttgggttcgggaaaatcagcttcacgtcggaacgcactaagtcattccagtcgtggatattcttcgggttgcctttacgcaccaggaagcccatggtggagtaaaacggcgagctgttattcggcagacggctttgccagtcggcggggatcagcttgcctttgtcgtgcagaatctggacatcggtcacctgattgtaggtcaccacgtcggccttcagcccttgcagaatcgccagcgcctgttttgatgaccccgcatgagattgtttaatcgtcagcttatcgccgccgttatctttcgcccactgctgttcgaactgcgggttaagggcggcaaacagctcgcgggaaacatcgtaggaactgttcagcaattccgtcgcctgcgcctgcgcgaccagcagcacagaagcagccagcgccagatatcctttttttagtgatttaacggccattgcgcacccttatcaatatgatgattttctgctgatcatcatatttataacggctatgaaaggagtaacggttttatataccgtttggcgatttggaagtcgaaaagagaataagggaatggcaaagcttatctgaatcacgcatgcagaaccggaaaacgttcgacgctgccggccgcgccgaacggttccctctcccacggggagagggtttggaggagatcttacagcgccagcagtctatccagcgaaggcgcgaagtagtacccgccggtcaccggtttggtaaaacgcagcatcgcgtcgcgcttaccgtcggtatcgccgaacatgctcagcagctgctgttcaatattgtgcagacgcgcgcagtaggcgcaaaagtagaggccgtgagtcccgctggcgataccgtacggcaggctctgacgcacaatcttcagccctttaccttcttctttcagatccacgcggctcaggtgagaggtatccggacgatcgtcgccgtcaatctcttcgttggcttctttggtacggccgatcatcatctcctgatcgggaacgctcatgcgattaagctgcttgaggttgtgctcccagcgctgcacaaatacgtagctgccgcccgcatcgacgccatcctgaatcaccgccacttcacggcgggtctcttcccccgccgggttttcagtaccgtcgacaaagccgctcagatcgcgctcttcaatccagcgaaagccgtgaatctcttctttaacatcaatcgctgcgccaaaagcggacagggccgcctgagcgacagaaaaattcagctcatgctgcgcggacagaatgtggattagcacatcatactgggtggccggggccagacctttgccataggacgggaagtcttttagctcttcagccccgacgccaccgcttagctgacgccagacgttatggccaaaagcgaccaccgcccccagcttcgcttccgggtatttcgcctgaaaggtggctaacttatcggcaaacaccttgctggcttcgcgcagggcgtcaacatcgcctttgacatttgcttcaatccaaatcgccgcacggcaatgttccggcaaaatgccgctctgaacctgagacatcgctcctcctgaaatagtacaaccacaacgctgtggctttttaaggcgctattgtacccgctttttcaggacctcgaatcacttcagatcaaattagcgacgccagataatcttgctcaccttccagtttttcagcgtgtcgtcggagggcattagctcatcagggccgctccagttgccggtgaaggcatagctaatatgctggctaccctcggccttgcactccaccacggcaccgttatcgttgctgcctttctggcagttaccaaacgctttgctgtagatatcgctgaacggggtaccgattttcacgccgctggcggccttgatattgctatcgcgcacgtcgatgcggctaatagtcccgctctcgccgttgatggtcagcgcgaccttgtcatcttttaacgcttcgaaatagcgcacaatattgccgttagccgttttcatgccgctgcgcaggcggtagctgctgccgagcgcgtcgccgatcgcctgctcgctcagcgccgttgacgccgtcaggttgcctacgccctgttcgctcacctccatagaggaaccaaaccagttccacggataagccgccgaccagttcaccgagctcatcgttgagcagccggttaaagccagcggtagtgcgcagagaagtaaacgtagcgatttcatgactgagtgtcctttctgatgtattcaacgcaagttggagtgcgcgatcggcaaaaagtgccgttaaacctgttcttcgcgaaaacaggctttcagccgacggctgcttaacagccaccagagcgcgtaaagatccgccgccagcaggccgatggtcaccgccgaaggcgactcgccgctcatccacaacagcggttgccagaccaacagcaagagctgggaaagcaccagcagccagcgcatcatgggccagagccgggggaagcgctgacgatgcccgctaatgataaacgccagcaccgccggaatgccggggagcaatcccagccaaaaattatcgtggtccggataaaacagattcagcagcgcgtcgccctgctggcgtgacgcgccggccatcagaaatagcacccacgtccgcgcctgaagcagcagcacgcaccaaaagagaaacggcaaacgcaggcggccgtgggtatcgaaatcggcggggataaactcagtattcttcatcttcaattaagcgcttgccgaggcacagcacgtctgaatgctcatagccaaggcgttcgtacatcccctgcaccacgtcattatcttcgcgaaccataatatttattttcggacagccgcgggcgatcagctttttctccagccgattaagcagcgcattagcaataccgcgaccgcgatattcaggatgcacgccaagataataggcagacccgcgatgcccgtcataaccgcccatcaccgtgccaaccacttcaccgttaacttcggcgaccagaaacaggctggcatcgtggttcagcttacgttcaatatccatttccggatcgttccatgggcgaaggagatcgcaacgctcccacagggtgatgacctcttcgaaatcttgctggcgaaaaacgcgtatctccatggtattccccaccattgacggttaaaaacagagattatggcgtgattgtgcccgatagccaatatcaggcgcaatgagccgcaaaaaatggcatactatgactttgtcatgtattgaaatgaaaagtaaaacaattcttattttgaatggtcgtatcagaaaagacgatacgatataacattggttaccacttgtttgcaattcaggccgaatgagcacttttaaaccattaaaaatacttgcttcgcgccgccaggtgctgaaagccgggctggcagcaatcacgctttcagggatcgcctcacaggccagcgcgaaagaacaacagccattgaaaacatccaatgggcacagcaaacccgcagcgaagaaaaaaggcgccaaacgcgtcgtgatgctcgacccgggccatggcggtattgataccggcgctatcggccataacggttcaaaagagaagcacgtcgtgctggcgatcgctaaaaacgtgcgcagcattctgcgcagcaacggcatcgatgcgcgcctgacgcgcagcggcgatacctttattccgctctatgaccgggtggagatcgcccaccagcacggcgccgatctttttatgtcaattcacgccgatggtttcaccaacccgagcgcggccggcgcttccgttttcgccctttccaaccgcggcgccagtagcgccatggcaaagtatctctcggaccgtgaaaaccgggcggatgaagtggccggcaagaaaacgacggataaagaccacctattgcagcaagtgctgttcgacctggtacaaactgataccatcaaaaacagcctgacgctcggttcccatatcctgaaaaagatcaagccggtgcacaagctgcacagccgcaataccgagcaggcggcgtttgtggtgctgaaatcaccgtcgattccgtcggtgctggtagaaacctcgtttattaccaatccgaacgaagaaaaactgctcggcaccaccgcgttccggcagaaaatcgccacagcgattgccaacggcatcatcagctatttccactggttcgataaccagaaagcccactcgaagagacgttaatgagacccgatgcgcaccaggtaaaagctttccttctccagctccaggatgctatctgccaaaagctcagcaccgttgacggcagcgaattcatcgaagatagctggctgcgggaaggcggcggcggcggacgcagccgggtgctgcgcgatggcggtatctttgagcaggctggcgttaacttttcgcacgtgcacggcgaggcgatgccggcctccgcaaccgcgcaccgccctgagctggcgggccgcagctttgaagcgatgggcgtctcgctggtcgtgcacccgcgcagtccctatatccccaccagccacgccaacgtgcgcttctttatcgcggaaaaaccgggcgccgagccggtatggtggttcggcggcggcttcgatttaaccccctactacggctttgaagaagatgccgttcactggcatcgcaccgctcgcgacctgtgccagcccttcggcgaagaggtttatccgcgctataaaaagtggtgcgacgactacttcttcctcaagcatcgtaacgagcagcgcggcatcggcggcctgttttttgatgatttgaataccccgaactttgaccattgtttcgactttatgcaggcggtgggcaatggcttcaccgatgcgtatctgcccattgtcgagcggcgtaaagagagggtctggggcgagcgcgaacgcgcttttcagctctaccgccgcgggcgctacgtggagttcaacctggtgtgggatcgcggtaccctgttcggcctgcaaaccggcggccgcaccgaatccattctgatgtcgatgccgccgctggtgcgctgggaatacgactaccagccggaagcgggcagcccggaagcggcgctgagcgagtttattcaggtgcgcgattgggtttaacgttgcctgatagtgtggttcgcaggccagatacggcgctgttttgcctgatggcgctacgcttttcaggcctgcgatgacggcgcgaatcgccatccgctaaatagatcgtcatcacgcccactgccgcatccgctgatgcagcgtcagcgacggtttctcggcgaacagctgctgataatcggtagcgaactggcccaggtgccagaatccccactgcatcgccgcatccttaaccgtcgtgctctgcgaccacgggctaatcagctcccggcgcaccgcgtttaaacgaatgcgcttcagccaggcgttcggcccgatccccagaatggcgtgaaaggcgttttgcagcgtacggcggctgacgtgcagctgctgacataaatcgagaaccgtcagcggctccgacatattctccagcacgtactcccgcgcccgggaaagcagacgccgatagctctggtggctaatgctctcggcggtaatcatcggctgcgcctcctccagcatcgcccccatcgccagcaggagattatcgcccaacaccttacgcaccgcgggctgatgaaggttctccggattctcgctaaacgtcgccagcgcctgctgcacaaagccccacagcgccgccttgtgctcctctttgacctccagcgccgactggttacgcagcatatgcagcacccgctccgggtgatgcaggaagctggcctggcgggaaatgacatcctccgagatcactacgcccagaatggtgtaatcatccggcgtgctgagctcaaactcggtgccgccgggtcgggtggcgatttcggcgctgccgaggcactgtgagccaataaacccctgctcgccgcgggttgccggaataccgaaccagaaggagttcggccacaccaggcaggactgacgcagcgccaggccggtatattcgcgaaagacctgaatatcatcgagcaggatttcggtaaattcaccgtgaaatttccccggatgcagctgatcgtaaatctgctgccaggcggtaatcgtcagggcatgttcatagacatcggtggtccgccgctgatggacgttgtccacctcgaccatcggcgtcagtttaacgtcttcgggtaatgcttcatgataaagatggtgcaggttggccggtttttctttttcatgatctgataaaccgggagcgctttcgcgttcccggcacctccgactggttaattttttaagcgatagcgactactgcgtttacgcaacgctccggtagaaaagagctgctccagcgccttcctggcctcttcaagcgaccagccgaaatgggcggccacctcccctgccgtcattccctgacgcgtcgaagagagcagcgtcagcaagggttctgaggattccacgaccaccggcggctccggcgtttgcggcagccgttgaaaaccggcgatcagccgctgggtatcctcttccgggcgtccaatctcccgacggctgataacgcgccccgtacgctgcgccgcagcgctgccggcatccagcgccgcccggcacgccgccaggtcgccttccaccaccagcgtcagcctgccggggtcaagaacctcatggctgagcagccgcacgttggccgccttcagcatcgcatccgccgcgtcaacggcggccaccatgccgtccacttccagtaatcccagggcgttgatcatcgcttcccccttacgcgcgctggattggatgacgggcaatatccagaacggcatcggtaaaggcgttacaggcggctttacaggcggcctggcttcccgtcaaaaaggcggcggaatagttggtttccgacggcggcggcacgtaggtcaccagctgcacgtcggccgatttcattgccgcatcgataccgaaggtcgcctccagcggcggcgccaccagataagcgatcggatcgcccagcgcaatgccggaggtagacgagagataagagccggtacgcgacaccacgtgcgccagaaacgccgtatcttcggcatcgttggcccactggaacgcggccccagtttcgatatgcgccaccatcgcatccagaccggcgcgcacttccgccgggttcgggccgcccagcataatcagcacttcacctgcggttggcgaagggccgtgggccgcgccggcgtaaagagaacgaccgtagaccacttccaccatcgcctgttttgtcgcttcgtcagcggcaatataagtcacatcatccgaatccgccgtgatgagtccgaggctacgtatatgtggcggtaatttaagctcgcgggcaaagccgtcattcactgaggcaatcacgcgcatggccgtcaccgaagggcgaattaaatctaatgcaggcatgatgcctccttaccgagtcatgttgatgccggaagccttctgctccagcatgcgtttggccaaatcgacaatcaccgccgcggcttctaccgggggcgtaccgccctggtgaatattggaaatacaggtcctgtccgcttcgacggtggtcgccacgcgcggcgaatacacggcgtaacaggagaggctttccgactgccccagccccggacgttcgcctaccagcaggatgaccaccttcgcgccgagaatttcgccaatctgatcttcaattttgacccgcccgtagcggacgaagaacggcgtaccgaccttcagtccggcctgcttcaggcccgacagcagcggcggcaggatctcttcatagttgacggtaatcgcgtcggtagagaggccatcggataccaccacctgaacgtcaggattcgccacgcactgcgccttcagcgcctcaatagcctccggactcagccgacggcccatatccgggcgcgtcaggtagaggtttttgtcgctaatttcggagcgcaactccagcaatccctgggttttcacccactcctccggtacctctttcagcaccgtatccttggagcgcgagtggtcggcgaggaagcgcagcagcgcgagggtgcgcggacgcggaccggcgcggccggtacacacgcgcgccgcggtgctgcgcttcagttcggccagcacttccgcacgatgcggctgctgcacgccaatccagcctttcgcctctggcgaacctaaatccagcacgcagctctccgccgcgacctcgcaccggctggcgcacttcgtcaccgtcgcctcaggcgctgctgctgccgtctgcggttgtcccattgacgccatcacgctacgtacaatttcttcaatctgcttttgatccatcatgtgtcatccccgcgtcatcaaaagaacagtgacggatcgcccgcccgttgggtcagacgaccgtttgccataatgcccatggtttccagccagcgttcgaactccggcgacggccgtagattcagcagctgacggacggtagcggtatcgtgaaacgcggtggtctgatagttgagcatgatgtcgtcgccgagcggcatgcccatgatgtagttgcagccggcggtggcgagcagaatcatcaggttttcattgaggttctggtcggcgtcggcatgattggtgtagcagcagtcgcagcccatcgagatgccgctcagcttgcccataaagtgatcttcgagaccggcgcgaataatctgccgatcgttatagaggtactccggcccgataaagcccaccacggtattgacgaggaacggatcgtagtgccgcgccaggccatagttgcgcgcctccatcgtcacctggtcggcgccgaagttcgcgccggccgacagcgccgagccctgcccggtttcaaagtacaggcagttctccccggcgatacggttaaactcggcgccgaccgcccgcgcttcatcgagcatcgccagctccacgccgaactcttttagccccttttcgctgccgcagatgctctggaaaataagcccccccggggcgccgcgacggatcgcttcaatctgggtggtgacgtgcgccagcacgcagccctgggtcgggatattaaacttgtcgataacgccgtagacggtatcgaggacgcgggtcaggttctccacgtcatcggttaccgggttaacgccgatcaccgcatcgcccgcgccgaacgagagcccttcgtagatttgcgcggcaatgctctgcacgtcatcgcgggtatcgttcggctgcaggcggcagctaaaggtgcccggcaggccgatggtggtgttggcttttttaatcaccggcattttcttcgcgccgtagatcaggtcggcgttggagcagaccttcgccaccgccgccaccacttctgaggtcagccctttgcgcacaaacgcgatgtcatcgctggtgacctcatcgttaagcacgtattcgcgcaggtcgctgatagtccagtttttaatccgctgataggcggtttcgttgacgtcatcctgaatcaggcgcgtcacgcagtcctcttcataaggaatcaccggattgttacgaatatcggcgaccgtcatatcggagagcacctgcttcgccgccacgcgctgctgcgaactttccgccgccacccccgccagcacatcccccgaacgcagttcgttggctttagccagcacctcttttacatccttaaactgataaacattgccgaacaatgtggtctttagtttcataagtcgttccctcaggaaggaaatgcgagtgatttcaccgtcaccggcacaaccgatccgccaaaaagaggcgtaccaatgtcgatatagtcccccgcccgtacgctcacctcatcgatgaccgccagcgggagttgttgcagctgcgggcgcagcagcatgcccagcgctttgccaaagtcctgctcggccaccaccagcaggggatgcgggttgggaaagcgcgcgacaaaagccagcagcgcgtcaatcaccaccagcagggcggcgtagcgcaccggcaacgaagcaggaagcgccagcacgtaagcatccgatcccggatccagatcgagctgcatcagcgcctgctgccaggcgctcagcagatcggcttcatcaagcgggatcgccaccggcagattgcgcagcgggagctgaaccccctccagccagatggtgctgccggaaagcgagagcgtgtgcgcgccggcgccaatcaccgtggcgcgtacggtttgcgccgggaactgcacgttcatctcccgcagccgcggatgctcatgcagcgccgtggccaacagtggcccaatatcagaaaaacagaacggatccgcgggctggttgcggtagcactcgcccactccgccggaaagggttatcacctcgggtaccgcgcctgcgggcagcaggccggtttgcatcagccgttgcgccagcggagagagcgtgccgtcgataacttcgacgatcagctccgccatccgccgcgctacctgcgctaactgcgaagcactcaacgcgcgcgcatcggcgcctgcgctaaaaacctcatcgacgatcatttgtcccggctgatgggcataaaccacccgcccctggccgtcggtctccagcaggcgcccgccaacgttcaggcaggcggtggcgctgatttttcccgcttcaaacagcgcgtagtttgaagtaccaccgccgatatcaatgttcagcacccggcacatccgctgttcagaaagggtttgcgccccggcgccgtgaccggcaatcaccgattccagatgcggcccggcgctagccaccacaaagtcgccgagcgactgcgagagcgccatcaccgccgggcgggcgttacgggttttcgcgctttcgccggtgataatgatcgccccggagtccaccgattcgggggcaaccccggcggcctggtactgcgccagaatcagcgccttgagttcggcctccttcagaccgccctgcttatcaaccggggtaaagaagaccgggctttgccagctaatttcgcgtttgatgaattcgtagcgcggcacctgcgacaccgccgcacggttaaccagctcaaggcgggagaagatcacctgagtggtggtggtgccaatatcgataccgacgctcagcagctggcgagttttcacgattgcgcctccgcttcggttttcgccgccgccggcgcgctttcatctttcggcaccagcagcatcgctacgccaatggcggtgacgccgccgatcagcttgccgacgatcatcgggaagatcatggcgttcatgttggcggcggcgaagcctaagtgatcccccagcgcgaaagcggcggagacggagaacgcgcagttgatgactttgccgcgggtatccatctgcttcatcatgccgaacatcgggatgttgttggccagcgtcgccaccataccgccggcagccatattgttgattttcagcagattaccgacgcgcatcagcggcttttcaaaccagcgggtcagcaacagcaccatcggataagcgccgagcagcacgcaggagatcgagccaatgacttcaatggcgcgcatcacctcgccgggctggtcgccgggagccataaagatcgggtcgagccccgggatcagatcccagccgagcaggaacttgatgaccgccgccgccaggccgatggtgatcagcgccaccagaaatttggcgaaaatctggaagccgttgatcattttttccggaataaacttcagccccagcgccaccagcaccgcgacgataagcaccgggatcatattcatcaggatcagcgcgaaggtgaactccaccggctgtccgttaatctccacgccggagtacatggccaccaggccgccggcgatgcagccgatcggaatcgtgacgatcccggccagcacgcccagcgccaggtagcggcggtcggagggctcgatgatgccgagcgcgaccggaatggagaacaccagcgtcggccccatcatcgccccgaggatcaggccggaatagagccacgccgccacgtcgccgcccgccagctctttggcgaggaagaagccgcccatatcgcaggccagcagcgttccggcgaacatcgacgggttggcgccgagcatttcatacagcggaattatcaccggcccgagcaggtgcgccagtgccggcgccagcgcggtcatcccgaccatcgccaggcccagcgcgcccatcgccataaacccctcttcgaactggccgccggatccttcgatgcttttgccaaacttgccgagaaagcgcgccgagccgccaaactgcgacaggatcctgtccacggcggcaatcagcataaagaacatcatgatgtacatgatgatttcgttaattcccatagcctttactccctgtcatttatgatttgtagatactgtgaacgccggggcattaaccgcgctccgggggctttcccgggtcgcggcgtgaacgccttacccgggctacggaatagcagacggctgcgatcctgtagcccggctaagcgcagcgcgagccgggacagccacacgcctccgggaaaatggccgcatcagcgcgccgccgcgtacagatcgataatctgctcccgggtggcggtgcgtggattggtgcgcagacaaatgtcctcctgcgccgcctgcgcccatgcgctgaaatgttcgggcttcgccccggcgtcagagagtcgtttgctcaggccgacttcggcgatcagcgcctcaacggcggcaatagcctcgtggtcgtcggtttttttagcggtcagcgcccggccgatctggctgaaacgctcgcggaataccatgcggttaaaccgcattaccgtcggcagcagcatggcgttggcctgcccgtgtggaatatgcagcgccgcgccgggctgatgcgccatcgcatgacacaagccaagacccgcgctggaaaaggccattcccgccatacacgaagccagcagcatgctttcgcgggcggcgaggtcgtggccgtagcccacggccttcggcagcgcctggccgatcatcgctatcgcgccaagcgccaggctatcggtgaagggcgtcgcgttgagcgcgctgtacgcctcaacggcgtgggtcagcgcgtcaatcccggtcatcgccgtcaccggcggcggaacgtcttcggtcagggcggcgtcgagaatcgccacgtccggcatgagcgaggcgtgggccagcacctgcttgcgcccgctgaccgcatcgataatcaccgtcacgttggtggtttccgagccggttccggcggtggtcggcaccgcaatgagcggcagacgcgggcgcagtacgctgctttccgtcatcgcgctgagcgtctgctccgggttggtgaccaacagcgcgaccgctttcgccgcgtcaagcaccgaaccgccgccaaaggccaccacgccgtcgcacttcgattcgcgcagctgcgccaccgccgcgcagacgtcggtaatgcacggctctcccggcggacagggccagacggtcatcgccacccccttcatcgccaggctgcgcgcaagcccggcggtcattcccgcctgatgcaggaaactgtcgaccatcaccagcagatggcttacgcctcgcgcttgcgcttcctggccgcaggcgctcagcgcgccgaggccgcacagcgtcaccggcggcacgctgaaggttttcacccgctgcagattcagggtatcgaatgcctgaaagagcgccgtctgcagttcagcttgcatagattccctccgctttctctctcccgctgctggctatcgccagcggggtcataaacaggctgtgctgcggtaaatgcacccgtaattccgggaagcgcttgcgaaacagcgcgtccacgcccggctgcatacaggagccgcccgccagccataaatcagcaatgccctggccttcgatatggtgagcaacaatctcggccatttttcgtataccggcttcaccaccggccagatctcctgggcgttgctgcgcttgtactgctccgcctcttccagcggcatgcggcggttaccggcaagggtcagggagatatggtgaccgccggtcgcttcatcggcggagtacgtcacctcgccccgtttgacgatagcgatcccggtggtgccgccgccgatatccaccacgcccgcgttgtcgagctgtagcagatccgccaccgcggtcggttcatccagcacgtggctaacttccagcccggcagattcgagtacgttgatcgaaatacgcgggtcggtgcccggcggaaacgaggtcgccgcgtggctgaagcgacagccaagctgctgttcgagcgtatcgagatggcggcgcacgatggtgacggcgccgaagaaatcccagacgatgccgtcacgcacgacgtcagcccagtccagacacaccgccaccggctgcccttcgctgtcgacaaccatcgacaccacgtcgcaggtgcctaaatccacgcccagccacagcggtgattcactggcggcaggcgtctgattacacagggcggccgctttttgcagtctgggggtgagccaacgttgttcgtcgtgtgccatgagtcatcccttatacaattcggaaggcatccaccagcacgcagcgccgcaggcgaacgaaggtgcgcgcgctggtcaccccctccccggttggcgtagtgatggtcatggtggtccagccctctccgcccagcccgagcccggcgatgcacggcccgtttttaacgaaaatgctggtatcaatggcgttcgccatctgattcatgttgtcgatattgcgcgagtgcatcgccgccgtatggtggcagccgccctccagctgcaccgccagcacgatagcgtcatcgacgctggccacccgtacgacagggagcaccggcatcatcagttccgtcacggcaaatggatggctggccggggtttccacgaacagcaggcgcgtctgcggcggcacgttcaggccgatggcggcggcaatcttgctcgcgtctcggcccacccagtcacggctgaccgtacctttgccgcgctcatcgatattcttcagcagcaccggctgaagctgctcggcctgggccgcgctgagcttcaccgcctgctggccttccatcaggcgcatcagctcgtcggcgacgctatcgaccacaatcagcaccttttcgtcggcgcagatgatgttgttatcaaacgaggcgcctttgacgatggaccgcgcggcgcgcgccaggtctgccgtttcgtcgaccactaccggcgggttaccggcgccggcggcaatcagacgtttattggtatgcttgcgcgcggactccaccaccgcttcaccgccggtgaccaccagcaggccaataccggggtacttaaacagccgctgggccgtttcgatgtccgggttcgccacggtgaccagcagattggccggaccgcccgcggcaatcaccgcctggttgagcagcataatcgcccgctgggaaacccttttcgccgccggatgcggggcgaacaccacgctattgcccgcggcaatcaggctgatggcgttattaattaccgtcgccgccgggttggtggagggggtgaccgaggccaccacgccccagggcgcgttttcaatcagcgtcaggccgttatcgccggtgagcacctgcggagagaggcactccacgcccggcgtgccgcgcgcctgggccacgtttttggcaaatttatcttcaacgcgacccatgccggtttcgctgacggcaagctccgctaattctctggcgtgtttttcgcccgcctcacggatggcgtgaatcgccagctggcgcatcgccacgcttttcagcccctgctgggccacctttgccgccgcgacggcgtcatccagggaggcaaagacgcccatctcatgaacggcgtcgtccggctggctgctggccgtcattttcagcagtaccgctttcaccacctgttcaatatcctgttgattcatgatgttcagtcctatttatggaaaatcacctgaccgccggccaccgcttcatcgacgataccgatgacgcacaaatcgacaggagacgcctcgctgcggtgtgcctgtcgcgccgagcttccgctcaccagcagcacccattcaccgggccccgcgccgatgctgtcgatggcgacggcgcactgcccgtcgggcttgcccgcggcatcaatcatctccaccatcagcagcttgtcgtgcgccagcccctgatggcggacggtgcagacaatctgtcccgtgacgactgccagtttcataccgcctccctgaattgcgtggtaagtcgtgggccggataagcgcagcgccatcaggcaatggcgcgcgttaatgccggagggcaacgctggcgcgtcttatccggcccgaccatcagatgttgctgtcgcctttaaaactgatggggaacacctcctccagatcgccgtgcggacgcggaatcacgtgcaccgataccagctcgccgatgcgctgcgccgcagcggcgccggcatcggtagcggctttgcaggccgccacgtcgccgcgcaccatcgcggtcaccagaccgccgccaatctgcttcacgccaaccagcttcacgcgcgcggctttcaccatcgcatcagaggcctcaatcagcgcaaccaggccccgggtttcaatcattcctaatgcttccattgtgttttcctcttacttaagggggtccagaacgggaccgttcattcaacctgcgtgggtaagcggcactcgccgcttacgtcactccggcgcggcacggctgccactaacgccagttcgataatttcctgcacgctacagcctcgggagaggtcgtggagcggtgcggccagcccctgaatcagcggcccgaccgcacgatagccgcccaggcgctgggcgattttgtagccgatgttgccggcttccagcgacggaaaaaccatcacgttggcccgcccctgcagcggactggcgggcgctttttgcgcggcgacctccggcacgaaggcggcgtcaaactgcagttcgccatccaccatcagctgtggagcgcgctgacgtacgatctctgtggcctgctgtacgttggcgacgttgggatgacgggcgctgccgctgctggaaaacgacagcatcgccacccgcggctcctcgccggtaatggcctgccatgtctccgcgctggcgatggcgatatccgccagctgcgccgccgtcggctgcggcaccacgctacagtcggcaaatcccagcgccggtccgacgtactgcggcagcatcagaaagatcgacgacagcgttttgcagccaggctgaaggccaataatgcgtaatccggcgcgcagcacgttcgccgtcgaggagagattgccggcaatacacacgtcggccttcccggcgctgaccatggcggcggcgaacatcagcgggtcgttgagtttttcctccgcgtccggcggcgttttttctccggcgcgggcaagccagctccgggcaaacgcttcgcgcatttgccggttgctgtgcgggtcgacgatctgcataccgtccatcggcaggcggtggctgagggcgaactggcgcagggcaaaggggctggcgatcaaaatcggctttgccagcccctgctgctggaggtagtgcgccgctttgaggacgcggatatccagcgcgtccgcaaacaccacccgggcgggcgaacgcaaagccagttgacgggcgcgttgaataatcattgatcccctcccagacgctgttggatctgactgacggttagcggatgtttcgccacgcttaaaatcatcatcacgtagacggtgctggagaggcggttgagcgcctgcagaatgtccggacgtaagacctcaaaactgcgggtaataaagacctgcgcggcgaccgtttccgtttcgcgtattttgctgcgcagcagattgagcagcgcggcatcgcggccgtggcaggcttccggcaccagatgatcgtggtcgagatagcgcagcggctggtgggaaaggcgatgcagttcatcctcgttcagcccgacgatagactgcgccgccagcggttcacccacggcgtcggcgcgcataatattgcccaggcgcgagcggatatccgccagccagggctgccagggctccgccagttcgatttgcagccataccgccagggcgatggtggcgtcgagggcggcgcgaaagcccagccgcggatcgcttttggcgaccattttctccgccgtcagatgggtcagggtgtccggttttttgtctaccggctggcggcacagttcgcagcaggcctggggatgagtaccgctgctggttaaaccgtgtaccggctgcggctgctgcgcgtcgtcatcgacaaacaggctgccctgctcgtcgagaaacttaatgcgcagacggcggctttccagcagctcccgggccgaaggcgtcagacgggcgtcggcgggcagatgaatttctgctccttcgctgagcgtatggttcgctctgagccaggcttcggtaataaaatctttcatagcgattgccagttcgcaggccaggcgacgtacaggaagcgcacggtcgacggcgtgccgaattcaatgctcgaacctttcgggataaacatcacgtccccggctttggccaccatggtttcaccttcatggcgcacgtggagttcgccctccagcaccatgtcgacctcgtcatagttcagcgtccaggggaagaaggcgttttcccactgcataaacccggcggccatgctgctgccgtcctgctcggtgaccaaatccgttaagccgacgcggtgcggttcggcgccgtcgaagcggccgaatttcacgctgctgccgtcaatgacctttacgccgcctttaccggtgaccgccttaaagctgggctgcatcgcgtccatccccagcgactgcttctccttcatcactttttccatcagctgcgccaccaggctttcggtaaactgcccttccggcagctgcgcgataatggtttcgcgaatgcgctggctttcggttttttcctctgccgccgggactgccggctctggcgcggattcatcgcactcctggatggcgacgcccagcagctccgcgacttcgcgggcttccggggtgatgatgctggcgcgcagcacaaccgatatttcctcttcgcctcgcgcgtgggccgcacgaatatcgttagctgtgataagtttcttcacctgccccttcctccttttggctgagctcactcaggtaattcaccaaatgctctacgctttgcgggtcgtgagcgttgagttcgaaaatcggctcctgaaaccccatcccgtacagcagttgccgcaccgcggcgacgtcggcgtccggcatatccgttttgctgatcgcggcgatatgtcgtttattcgcgccaatatccagtagcccggcgggtaagcgactttcggtatcatttgccgcgtggacataaatcaacgtatcgacatcctgcagcgtggtaattaatgcgtggtaccagcgcggatgactgaaatattcccccggggtgtcaatatcgcctttctcgttaaattccacggcctgcgtttttctcgcgagggaataattcccctgcaacgcattaaatagcgttgtttttcccgcacccaccgtaccgacaaatgcaatacgtttcattgccgcctctaattagcttttggttaactcgcagagggtgtaatttaataatcggccaagcccgctcaccgtctgcagcagcgcctcttctaccgcgccgaccgagccataaatcaccagcgcgccgctaaaccggtcgagaaaaccgatatgcacatcggcggccttcatcgctaaatcaccggcgatcatggcggtttctccaggggttaaggtcataatgccgatagcgccggattcgggaacgccgatctttttcgccagttctgccccaggatgtgcaatcagatgcgccagcgtcacctgcttgccgggtacaaattcctgaatgatgcgttctttatccatggctcaccgctccgctaaaacttgcgcttatcgtgacaagtttccgctggagtaaataacaaaattcggcaagttgatttgaaaggtgagatagatcacttataaacagaaataaaaaagcgcgggagaattcccgcgcctgaaataattaaatgaacattacagcggctgagtttgcgcttcaacaaccgccagcgcgaccatattcacgatacgccgtaccgaagcaattggcgtcaggatatgcaccggctttgcgacgcccatcagcaccggtccgacggtgacgccttcagagctggagacgcgaagtaagttgtaactaatacgcgccgcttccatattcggcatcaccagaatattggccgaacctttcagcgggctgtccggcatccgctcattacgaatgctttccaccagcgcggcatcgccgtgcatttcgccatcgatcatcagctccggcgcctgcgccttcaccagctccagcgcctgacgcattttgctggcggacgggcagtccgaggaaccaaagttcgagtgcgacagcagcgccacccgcggttcaatcccgaatcgacgaacggtttctgccgccatcagggtgatctcggcaatttgctccggcgagggatcgtggttgacgtaggtgtcggcgataaaggtgttgccgctcggcagcagcagcgcgttcatcgccccggccgcatgaaccccttcgcggtagccaaacagcggctgaatgacgctgtagtgctcgtgatagtcaccgatggtgccgcagatcatcgcatcggcttcgccgcgctgcaccatgatcgcgccaatgaccgtagtgttgctgatcaccgcccgctgcgcctgctcctgggtgatcccgcggcgcttcatcagggtgtaatattcattccagtactctttgaagcgcggatcggattcgttattgacgatctcaaaatcaaccccggctttgatctgcagtcccagcttctggatgcgcatctcaatgacgccgggacgaccgatcagaatcggtttcgccagcccaagggagaccagctcctgagtcgcgtgcagtacgcgggtatcttcgccttccgccagtaccacccgcttcggctctttgcgcgcctgcgagaaaatcggcttcataaacaggttcgttttgtagacgaactcgctgagcttctcgatgtacgcatcaaaatcggcgatcgggcgggtcgcgacgccggagtccatcgccgctttcgctactgccggagcaatcttgacgatcagccgcgggtcgaacggcttcggaatgatatattccgcgccgaagctcagatcctgatcgccgtaggcggaggccaccacttcgctctgttcagcgtgcgccagctcggcaatcgcgtgcaccgccgccagcttcatctcttcgttaatcgccgttgcgccgacgtccagcgcgccgcggaagatgaacgggaagcacagcacgttgttcacctggttcggatagtcggagcggccggtacaaataatggcgtcggagcgcacctctttcgccagcggcggcagaatctccggctccgggttagccagcgccagaatcatcggcgcgcgggccattttcttcaccatctcctgagtcagcactttcgggcccgagcagccgaggaaaatgtccgccccgtcaatcacgtcatccagcgtgcgtttgccgctgtcttcaaccgcataggccgctttcgtctccgccatatttggctcgcggcccttatagataacgcctttcgagtcgcagaccacgatgttgtgtttctgcatccccagcgccaccagcaggttcatacaggcaatcgccgccgcgcccgcgccggagaccaccatccgcacgtcggagatgtttttctccaccacccgcagaccgttaagaatcgccgcggtactgataatcgctgtcccgtgctgatcgtcatggaaaaccggaatattcatgcgctcgcgcagcttttgctcgatgtagaagcactccggcgctttgatatcttcaaggttgataccgccgaaggtcggctccagcgccgcgacgacgttgataaatttgtccgggtccagttcatcgacttcaatatcgaacacatcgataccggcgaattttttaaacagaacgcctttgccttccatcaccggcttaccggccagcgcgccgatattgcccagccccagaacggccgtgccgttggagaccaccgccacaaggttgccgcgcgcggtatatttataggctgccagcggatccttctcgatttccagacagggcgcggcgacgcccggcgagtaggccagggccagatcgcgttgggtagccagcggttttgtcggggagacctggatttttccggggaccgggaattcgtggaaatcaagggcgctttgttttaactgctcatccattttatcgttcctttcacgtatcgatcgtagggggtgaaacgttatcgcgtacctggtgttcaccctaaagggccacctagtatctcgcctgacggcttcgtaaactttgaacaccgccaaactctcgccataacaaagttatatttgttatcgatttatattgtttatgtaacttagtttcagaagcaaggatagccccgtctgctatgctttttagttatgcaactcatcaccctctctatcctaatccaataaaaactcatgtaacctattgtttcaggagcacattatgtcccgtagagaactagccaacgccatccgcgccctgagtatggatgcagtccagaaagccaactccggccaccccggcgcgccaatgggtatggccgatatcgccgaggtgctatggaacgatttcctcaagcacaatcctgaaaacccgcaatggtacgatcgcgaccgctttattctctccaacggccacgcgtcgatgctgctctacagcctgctgcatctgacgggctatgacctgcccatcgaagagataaaaaacttccgtcagctgcattcaaaaaccccgggccacccggagattggctatacgccgggagtggaaaccaccaccggtccgctggggcaaggactggcaaatgccgtgggcctggctatcgccgagcgcacgctggcggcccagtttaatcagccagaccatgagatcgtcgatcacttcacctacgtgtttatgggcgatggctgcctgatggaggggatttctcacgaagtgtgctctctggcggggacgttaggactaggcaagctgatcggcttctacgaccacaacggcatttccattgatggcgaaaccaaaggctggtttaccgatgacacggcaaaacgctttgaggcctatcactggcatgtggtgcatgaaattgacggccacgaccccgaagccgtgaagaaagcgattctggaagcccagagcgtgaaggacaaaccctcgctgattatctgccgtacggtgataggctttggttcgccgaataaagccgggaaagaagaggcccacggcgccgcgctgggagaacaggaagtggcgctggcgcgccagcagctgggctggcatcacccggcgtttgagatcccgaaagagatctaccgggcctgggacgcgcgtgaaaagggacaaaaggcgcagaaaagctgggaggagaagtttgccgcctatcagcaggcccatccgcagctggcggcggagtttacgcggcgcatgagcggcggactgcctgagtcgtgggatgaaacgacgcggaagtatattgccgatctgcaggctaacccggcgaaaatcgccacccgcaaggcttcgcaaaatgccctcgatgcctacggcccgcatctgccggaactgctgggcggctccgctgacctcgcgcccagcaacctgaccatctggaaaggatcgacttcgctgaaagaggatccggcgggtaactatatccactacggcgtacgcgagttcgggatgacggccatcgccaacggcatcgcgcatcacggcgggtttgtcccctataccgccaccttcctgatgttcgtcgaatatgcccgcaacgcggcgcgtatggcggcgctgatgaaagcgcggcaaatcatggtctatacccacgactccatcggtctcggcgaagatggtccgacgcaccaggcggtagaacagctggccagcctgcgcctgacgccaaacttcagcacctggcgaccgtgcgatcaggtggaggccgcggtggcgtggaagctggcggtcgaacgtcacagcgggccgacggcgctgatcctctcaaggcaaaatctggcgcaaatggcgcgcacgccggagcaggtacagaatatcgcccgcggcggctacgtgctgaaggacgctggcggcaagccggacctgatcctgatagctaccggttcggaagtcgagatcaccgtgctggcggcggagaagctgctggccaaaggggtgaacgtgcgcgtggtttccctgccatcgaccgacgtgtttgatgcccaggaggaagcctaccgggaatcggtcctgccgtcggacgtcagcgcccgcgtcgcggttgaggccggcatcgccgactactggtataagtatgtggggctaaaaggcaaaatcgtcggcatgaccggctacggtgaatcggcccccgcggataagctcttcccttacttcggctttaccgttgagcatatcgttaccgtaggggacgaggtactgaacgggtaacccatagcgtgggccaggcgtctggcccctgccaattatcgcactgcggctgccgcgcgtagcgtaccaggctaaaccgctggccgtcatagcgccagcgcgtttgcgtcccgcagtcgccgggcgcgcgccctttatccagcgtcaccagttcctggcgtcgatcgtcgtagcgggcgtttaccagttcgacatcgcgcggcccgtcgccggggggctggaaaggcagagtgagccgtaccggatgagcaatatacggccgctggcgcgacaccagccaggccagccaaatggtgttgtaggcgcccgcttcgcagctggtcatcagcagcaccctatcgtcggtcagcgcggcaacccgcacctcgcggcgaaacggatccagcgaacaggcgctgctgttcatgcgctcgttgccataatccatgagatcgttaagttcatcgcggctgaggggggactccgccacgtcgattctcgccaccgagcgcagcgccggggcgggcggaacgctgagcggcggctcttcccccttccctacccacgcggtttcgctccccacgcgcttctgccggctatcgataaacagcagggcggctttcagcccctgtaaagagatggcctgcaggccattttcgagggttatcgcctttgctgcctgcacctgctgcagaaaggcatcaatggtgacgctatcgtcggtttcaagcagtttgtcggcgatctgccaatgtttatcgcccagagacaggggtttaccatcgaggcgaaggcgcggcgcaatcggcgccagcgccgcgaccggattgcccacgccgccgagttcaatgcgcaggctggcgttggtggccgccccggcgctgcgggtgagggtcatgaccaggccgtgatgcagcccgacgttgcgggccacgcagaagttctgattgttgcaggttacctgccagtcattgaagagctgttgtgccggcgccgcccgcaccagcgacgtcggcagtaaaccgaaaagcagaaacaaaataacccgatgcaacatgagcggcacaaccccggagaaaacgccatacacagcggctatgttcaccagcggcgaggttttactcaatcggatttatcagagatccccgttcatcagcccggaggtttgcaaatattgcagcaggatcaccgctttgccatcgcggatctccccgttcgccatcatctccagcgcccgatgataagggagctccagcacctcaatatcttcatcatcaacgccgccgccatcgttggcccgctgagtatcgttatattcggcaataaagaaatagataagctcggtgacgccgccgggcgacataaacagttcaaacagtttgcgcacttcaccgacttcgaaaccggtctcttcaatagcttctttgcgcacgcactcctccggctcatcgctgtccagcagcccggcgcaggtttcaatcagcatcccgtcttcgttgccgtttacccaggtcgcgatgcgaaactggcgaaccagcacgacggtctgcttatggcggttatacagcaagatggtagcgccgttgccgcgatcgtagacttcgcgtctatggcgaaccacgctgccgtcgctgcgcgtcagttcataggtcatgttgcgcaaaaggaaccagttttcggagaggattttatctttgataatgttgatattgagtgacatacgagccccacagcgtgaaatgacgattccatactacgctgtgaagcccgctttgtcgtcagtgaagcggaatcgatttaacctcgaggaagtccattatcccctgcgccgcgtggcggccttccgccatggcggtcaccaccagatcggcgccacgcaccgcatcgccgccggcaaacactttgcgatgggtggtctggtagcggtagcggctttccacattggccttgattcgaccccggctatcgagcttaacgcccaccgattccagccacggcataccgtgcggatggaaaccaaaggccatgatcaccgcgtcggcgggcatgacaaactcgcttccggggattggcgacgggctgcggcgcccctgagcgtccggcgcgcccagccgggtacgcagaaagcgtacgccgttgacgtgtcccttttcgttcagctccagggtgaccggctggacgttaaattcaaactgcgccccctcttcgcgcgcgtttttcacctctttcttcgaaccaggcatattggcttcatcgcgacgataggcgcaggtaacctgcttcgcgccgtggcgcagcgcggtacgcacgcagtccatcgccgtatcgccgccgccgagcaccacgacgttcagcccttcggtgttgacgtaaggctcttccggcagctcaagcagccccatcacctgtttggtgttggctatcaggaacggcagcgcgtcatatacgccgggcgcgtcttcattcggcagatccgctttcatcgagcgataggttccggcgccaataaataccgcgtcatagtcatcaagcagcgtcgtcagcgggatatctttgcctatctcgcagttcagctcaaagcgcacgcccatctgggtaaagatttcccgccgccgggcaagcagagatttatccagcttaaaggccggaataccaaaggtcagcagaccgccaatttccgggtgacggtcaaagaccaccggactcacgccgttacgcaccagacggtcggcgcaggcgagcccggcaggacccgcgccgataatcgccacccgcttgccgctttcaacgacctgagaaagatccggccgccagccgttggccagcgcctggtcggagatatagcgttcaatgttgccgatagtcaccgaaccgtgctcatcgcgcagcgtgcaggccccttcgcacaggcgatcctgcgggcagacgcggccggtaatttccggcaggcagttggtctggtgagaaagctccacggcggcggaaatatccccctttttcacgcgttcaatccattgcggaatgtggttatgcagcggacaggtccattcacaaatgctgtgctcgccgcacgtcaggcagcgctccgcctcgcggttggcctgcccggcgctgaacggcagatagatttcgctaaaattggccttacgcgcctcggcggatagcttgtcgggctcgccgcgcggcggcgtcgcggccatctgcgcgactttgcccgcggagcaaggcgccatcgccgcgccggggtggccaagacgcgccgcgcgctgacgccgctgtttcgccagattcaccagcgtgctgtccgttgccagtaccagcgcttcggccgggcagttttgtacgcaggcgggcccctcttcgcgaccgctgcacaaatcgcatttatgcgccgtcgctttgaccctctcctcctgtaccggcgtcaggacgatttgcatcacgccaaacgggcaggcaaccatacaggatttacagccgatgcatttctcctgattaacctggacgctgtcgttaagctggctgatggcgccattgggacaactgcgggcgcacggcgccccttcacaatggtggcaggttacggcgttacgtttttgctcgtttttgataaccgtaatgcgcggcaaaaaacgctgcggggtcaaaacatgctgctcatcgttgtgcgccatgacgcaggcaacttcacaagccttgcatccgatgcacttatgactatcgcttaaaataaagtggttcatgacatccttcagtcttcgtggtgaataacccctcaattcgcatgcttatctattacccgacaaaacggtgccggaacaatgtgcatttgcacaggttgccgattttttggtaataacccgaggtggatcaatttttttgacttaaatgaaatcacgttttatttagctaagtaataatgcgctacgtatgcgccaccgcggcggcgcgccgaaaggaaggagcaggtagaggaagaaagagagttctttacgctgccataaaaggcacacgataaattacactatctccttattttctccacgattgcctgagggcttgccgctagagtgtcacaggctgtgcaataacaaaaaaatgtgcaaaatgaggtcctaattctgatggcgaatttttttatcgatcgccccatttttgcgtgggtactggcaatacttttatgcctgaccggtacgctcgcaattttgtcgcttcccgttgagcaatatcccgaccttgccccgcctaacgtacggatcacagcgaactatccgggcgcttcggcacagacgctggaaaatacggtcacccaggttatcgagcaaaatatgaccggcctcgataacctgatgtatatgtcatcccagagcagcggcaccggccaggccaccgtgacgctgagctttaccgccgggaccgatccggatgaagcggtccagcaggtgcagaaccagctacagtcggcgatgcgcaaactgccgcaggccgtccagaaccagggcgtaacggtgcgtaaaaccggggataccaatatcctgacgatcgccttcgtctctaccgacggcagtatggataaacaggatatcgccgactacgtcgccagtaatattcaggacccgctcagccgggtcaacggcgtcggagatattgacgcctatggttcgcagtattcgatgcgcatctggctcgatccggccaaactcaacagctttcagatgacggcgaaagacgtcactgatgccatctcttcgcaaaacgcgcagatcgccgtcggccagctgggcggcacgccgtcggtggataaacaggcgctcaacgcgacgattaattcacaatcgctgttacaaacgccggaacagttccgtgatattaccctgcgggttaatcaggacggttcggaagtcacccttggcgacgtcgccaccgtcgagatgggggcggaaaaatacgattacctcagccgctacaaccgccaggcggcgtccgggctgggggttaagctggcctctggcgcaaacgaaatggcgaccgctgaacgcgtcatcagccgtctgaacgagctgtcgcaatatttcccgcacggcctggaatataaagtcgcttacgaaaccacctcattcgttaaggcgtcgattaccgacgtcgtgaaaacgctgcttgaagccatcgcgctggtctttctcgtgatgtatctgttcctgcagaacttccgcgccacgctgatcccgaccatcgccgttccggtggtgctgatgggaacctttgccgtcctttacgcctgcggctacagcatcaacaccttaaccatgttcgcggtggtgctggcgataggcctgctggtggacgatgccatcgtggtggtagagaacgtcgagcgtatcatgagcgaggagggcctctcgccgcgtgaagcgacgcgaaaatcaatggggcagattcagggcgcgctggtcggtatcgccatggtgctatcggcggtatttgtgccgatggccttcttcggcggcaccaccggcgcgatctaccgccagttctcgattaccatcgtctcggcgatggtgctgtcggtgctggtggcgatgatcctcaccccggcgctgtgcgccacattgcttaaacccgttcataaaggcgaaacccacgggcagcggggcttttttggctggtttaaccgcacgtttaaccgcaacgccagccgctacgaaaccgcggtcggtaaaattcttcatcgttcgctgcgctggataatgatctacgtcctgctgctgggcgggatggtctttctgtttctgcatctgcccacgtcattcctgccgctggaagaccgcggcatgtttaccacttcggtgcagttgccgagcggctcaacccagcagcaaaccctgaaggtggtgcagcaggcggaagactacttcctgaacaatgagaagcaaaacgtcgaatcggtattcgcgaccatcggctccggccccggcggcaacggccagaacgtggcgcgtatgttcgtacgcctgaaggactgggacgaacgcgatcccacaaccggttcatctttcgccatcattgaacgcgcaaccaaagcgtttaacaaaattaaagaagcgcgcgtctttgccagcagtccgccggccatcagcggtctgggcagctccgccggttttgatatggagctggaggatcacgcgggcaacggacacgaagcgctgatggccgcccgcgataccctgctggagctggccggcaaaaataaccagctcacccgcgtccgccacaacggcctcgacgatagcccgcagcttcaggtggacatcgatcagcgtaaagcgcaggcgctgggcgtctctatcgacgatatcaacgacaccctgcagaccgcgtgggggtcaagctacgtcaacgactttatggatcgcggccgcgtgaagaaggtctacgttcaggcggccgcgccgtatcgcatgctgccggacgatatcaacctgtggtacgtgcgcaacagcagcggtacgatggtgcccttctccgccttcgcgacctcgcgctgggagaccggctcgccgcgtctggagcgctacaacggctactcggcggtagagatcgtcggtgaagccgcgccgggcgtcagtaccggtagcgccatgacgattatggaagagctggcccagcagctgccgaacggctttggtctcgaatggacggcgatgtcttatcaggagcggctctccggggcgcaggcgccggcgctgtacgccatttcgctgctggtggtgttcctgtgcctggcggcgctgtatgaaagctggtcggtgccgttctcggtgatgctggtggtgccgctgggggttatcggcgcgctgctggccacctggatgcgcggcctggaaaacgatgtctatttccaggtaggcctgctgacggttatcggcctgtcggcgaagaacgccattcttattgtcgaatttgccaatgagctgaatcagaaaggcgaagatctgcttaccgccacgctctccgcctgccgccagcgtctgcggccgatcctgatgacctcactggcgtttatcttcggcgtactgccgatggccaccagcacaggggcgggctccggcagccagcatgccgtcggcaccggggtgatgggcgggatgatttccgctacggtgctggctatcttcttcgtgccgctgttctttgtgctggtacgtcgccgcttcccgctcaaggaacggccgcaataatcgggacgcgccctgacgatattttcgccagggccaaataacagaaaaggcgaccggacaggtcgcctttttcatgtggtcgcttcaactgcattattattctgcctgtgaaatcgccatgcttttattgcggaaaactatttacgaagcatgccttcgataaagtctttccagttccccagttcgtgttcaatcataatagcctctcttattattatgggtgattttatgcaaattcattgatggttaaaagcctgtttgcgctatcgtactgataactttcattaccccctgcggaacgttctctttcattcgtaagtactatgagccgattttgcgcattttaatgtgaccaacagcaacatttagcaacatttgttcatcagcctgaatcaccgggatccgccttgaggccaggaaacaccgtcagggagcgtttaaaaaacagccaaaatgtaacgatgaatatatcccgacgggaaaaaacgatatttattaaagcatttcacgtattatttattcagggcttatatattcggaacattcttagccaatcgtttaattcaacggaaaaggtttaatcatgcttaccatgtacgggataaaaaactgcgacaccataaaaaaggctcgccgctggctggagacgcagcagatagaatatcgctttcatgattatcgtgtcgatggtctggatcgcactttattagatacctttatcgctgaactcggctgggaagccctgcttaacacccgggggacgacgtggcgcaagctggatgaaacggtccgcgccggtatcaataacgccgacgctgcggcaaaactgatgctggaaatgccggcaatcattaaacgcccattgctctgcgcgcccggtcagcctatgctgctgggtttcagtgaatcaagttatcagcagtttaacgaggtgtagtctatgtcttgcccggtcattgagctggctcagcagcttattcgccgcccttccctcagccccgatgatgcgggatgccaggcgttaatgattgaacgcctgcgtgcgattggctttaccgttgaaccgatggatttcggggatacccaaaacttctgggcctggcgcgggcgcggggaaacgctggcgtttgccggccataccgatgtcgtcccgtcgggggacgccgatcgctggattaatcccccctttgaacccaccattcgcgacggcatgctgtttggccgcggcgccgcggatatgaaaggctcgctcgcggcaatggtcgtcgccgccgaacgttttgtcgctcagtatccgaatcataaaggtcgtctggccttcctgatcacttctgatgaagaagccagcgccaaaaacggcaccgttaaggttgttgaagcgctgatggcgcgcaacgagcgcctggattattgcctggtcggcgaaccgtccagcaccgaagtcgtcggcgatgtggtgaaaaacggccgtcgcggctcgctgacctgcaacctgaccattcacggcgtgcaggggcacgtggcctacccgcatctcgccgataacccggtgcaccgcgccgcgccgatgctggcggagctggtgaatatcgaatgggataagggcaacgagttctttccgccgaccagtatgcaaatcgctaacgtgcaggccggcaccggcagcaacaacgtgattcccggcgatatgttcgtccagttcaacttccgctttagcaccgagctgaccgacgaaatgattaaagcgcgcgtcgtggcgctgctggagaagtacgcgctgcgctacagcgtcgactggtggctctcaggccagccgttcctgaccagccgcggtaagctggttgatgcggtggttaacgccattgagcactataatgaaataaaaccgcagctgctgaccaacggcggcacctccgacgggcgctttatcgcgcgtatgggcgcgcaggtggttgaactggggccagtgaacgccaccattcataaaataaacgagtgtgtgaatgccgccgacctccagctgctggcgcggatgtaccaacgcatcatggaacagctggtcgcctgacggcatcaatagagaagaggtaagcgcatggattggctaacgaaatactggtgggttctggtgttggtatttttggtgggcgtgatgatcaacgtgattaaagatctgacccgcgttgaccacaaaaaatttctcaacaataaaccggatctgcccccgcatcgcgacttcaacgacaagtgggacgacgatgacgactggccgaagaacgacccgtcgaagaagaagtaacatcttaccgcggattgccataaagcaatcgcccggcgagttcgacgcgggtcaagtagccctgacagatacgcagcatcgcctccgggaaaatatcccactctgcgctcttttcccgggggcggcgcttaacgcgccttgcccgggctacgggtttccagctcgttgcaagtccggtagcccggacagatgcgcagcatcggctccgggaaattatcccactctgcgctcttttcccgggggcggcgcttaacgcgccttgcccgggctacgggtttacagcccgtctgccggccggtagcctggactgatgcgcagcatcgcctccggggaattaccccactctgcgctctttatcccgggggcggcgcttaacgcgccttgcccgggctacgggtttcctgctcgtctgcaggtccggtactcggacagatgcgcagcatcgcctccgggaaattaccccactctgcgctcttttcccgggagcggcgcttaacgcgccttgcccgggctacgggtttccagctcgtctgcaggtccggtagcccgaacagatgcgcagcatcggctccggaaaattaccccactctgcgctcttttcccgggggcggcgcttaacgcgccttgcccgggctacgggtttacagcccgtctgccggccggtagcccggacagatgcgcagcatcgcctccgggaaattatcccactctgcgctcttttcccgggggcggcgcttaacgcgccttgcccgggctacgggtttacagctcgttgcaggtccggtagcccggactgatgcgcagcatcgcctccgggaaattatcccactctgcgctctttatcccgggggcggcgcttaacgcgccttgcccgggctacgggtttccagcccgtctgcaggtccggtagcccggacaggcgcatcgcgccgcctccgggtttattatcacagcagttcaataatatcgctgtctttcggcgtgctgccgctgagggcttcgtcgaaatagtgcttcggtacggtaaagcgcagatgatcgagggcaaactgcatactgcgatcgtcaatcgcgtgccccagatcttcaacaatatccagcgtcacgtcaccgccggcctgctgcagcgcctcctgccccgccaccgcccacgccagatcgatcacccgatcttcaccgccgtggatcaggtgaacagtggtcgcggtcgtcgcggtctccggcagcgtcgcatagcggccgttaaaggcgatcacccgcgatgccagacccggctcggctttaatgctctccagcgacataatcgccccctgtgagaagccgatcagcgccgtcgcctgcgggctgacgccgctctgctgttgccagtagcgcaccgtttcgataaaggtcggcatgatggcatccactcgctgctggcggttttcttcgctaacgccctgcacggaaaaccactggcgtcccggaggcggaccgcacggctcagcgccgccgatactgacaatcagcgcatcgggaaacagcggcgcaaaccagctaccgatttgccccatggccaccgggttatcgccgacgccatgaaacagcagcagcagttgctgtgcaggtgtcgcggggctttgaacaataaaatgatcgtgtttcatggctgtctccttaatgtctgcaaggaagtttacgccgcaggcgaaatatgaccatgccatttaactgaaggagttagttaaaaaaattgcagcatttgaacctgccggcgcaggtcgttggcgcggttttcatccaggctgagcagcgcctgcgccgcttcttcgcgcagcctggccagcagcgctttccgtccggataaacctaacgtttggcaaagcgcggcctcatcctgctgctgcaggcgggcccgcagcgccggaagcggcagctccaccaatataagcaggcgattgaggctacccgccgaggtcagcagcggacgatgggcaaaagcaaaacccgccacctccagccagtcttcttcagtaagaatagtcgctttcagcgccgtcagcggcacaggttcatctcgccactcgcgcagccagaattcgtcgcgctgcagccgttgggcttcttcgcgtgccaggcgatggcccgcttcgctgagaggatagagcgccatcgcggtgtaacagccgctgctggcttcccgatgcgtgcccagccgcaccagcgtaaaaccgcagcgttgccagaagcgccacagctcaggcgtgtagccaaaactcaccgagagataatcccggtccgcagcctgcgacgccgcccggaccaccagccgctgccccagcccttcgcgctggcgagccggatgcacggcaatacggctgatgcgcagccccgctaacgtagccgccagtgggctaccgccgtgcgccgccagcgactgcgccaccagattgccgcgcggacgacgatagccggcccacaccgcctggctaagcggcggctcaagaccgccctcctccaccagccatagcgatccggcgatgcgctccccgccgcgggcgcaggtaaaatgctgccccggcgcatccatcatgcgccggaggtccagcggcgacgtgcgatagtgggccccggagagcagctgatacatcgcttccggtaacgcaggctgtcgccgccagctctcctggctgacgctttccagcacgatatcgccgcctggcgcgtgctgaaaggtctcgtcgttgaacagcagcagccgcgcaatcgccgcctccagcgggcagccgcttgcccaacggatgggcgtcgtcaggctaaactgccgtaagtgcgcaaaactggcgcaaaacttaagcaaaaagccgcgtcccgtcccctcgtacccctgaacggtagtggtcaacagcgtcctcgggaagcgggagaccagctggcgcagcagcggcccggggatggccgcggcctcatcgacaatcagccatccggcggtgcagccggaagccagcagtgcgtcgggggccataaagcggaaagcctccccggcgaatgtcgccatcacctccgctgctccccgcgccggtgccgtgacgatggcatctccccccagatggcgaataagcattcccgcgagcgcggacttgcctcgcccgcgctcggcggttagcgccgcaataccgggagggaaccgggccagttcggcaagcacggcagcctgctccgcctgcggatgtccgtcggcgggatgccatggcgggcgcacgggtaacgcgggcgccgcaagttcattgccctgccgccagagaatggacgcgttatccgcactaatctgttggcaaaaacgataaacaaaattcggcgtagggatggggtcgggagcgtcgctccagcgcagagaatccgcatcaggacgggccggccattgcgcaaagtcgggggtgagcaataccagccagcttccggcgcgcagcgtaccggctaatgcggcaaaggccgccacatcaaaaccctcgcgggcatcgaaaaaggcgtgctggaattcgcggcccagcagcgatttcagggcagcagacgagacgtacggctcgggcatcggacgcgggccgacccacagcccgtcgcccgccagcgcggtacggactctttgcgcctgacgcagggtccaggcatcgtcgccgctgagaaccagcagacgacgaacgccttcgcgcgccatctgcgccgtcaggtgacgcagttcatccatgacaacagagcattacagcgcgttgccgaaggtgttgcactgcgccgggtcgccgctatcgaaaccgcgtttaaaccaggtatagcgctgctgcgacgttccgtgggtaaagctgtccggcacgacgcgcccctggctctgctgctgcaggcgatcgtcgccaatcgcctctgcggcattcagcgcttcctgcagatcgccggtctccatgtagtcttgcttctgcatgttgtagccccagacgccggcaaagcagtccgcctgtagctccatttttaccgacagacggttcgcttccgcctgcgaagcgttttgctgcagctggcgcactttcgattcaatacccaacagcttttgtacgtgatggccaacctcgtgggcgataacgtagccctgcgcgaaatcgccgccggcgccaagcttgtttctcatctcatcgtagaatgacaggtcgatatacaccgtgctgtccgcagggcagtaaaaaggccccatgaccgattgaccggtgccgcaggcggtccgcgtcgcgccgcggtacatcaccagtttgggctgcggatactgacggcccatatctttaaaaatagcgtcccaggtatcttccgtgtccgccagaatcaccttcgtgaatttcgcggcctcttcatcctgcgggctaatggagcgttgggtggtttgctgttgagataccggctcgccggtcagcatgccggttaaatccacgccgtaatagcccgccaccagaacaataatcagcagtacaatgccgcctttaccgctggggagacgaaaaccgcctcctccgcccatcggtgaaccagattgaccacgacgatcttccacattgtcgctctcgcgacgtccttgccagcgcataagcacctcaattcatcatattaaccaatgaataagatcgtaggcggttcagcggaggattaccacaggaaacagcaagaagagcgccagaagaagaaaacttcttctggcgtcgggggattagtcgagcttcacgcccaggcgatgagcgacttcttcgtaggcttcaatcaggccgccaaggctctggcggaagcggtctttgtccattttatccatggtttttttatcccacagacggctgccgtccggagagaattcatcccccagcaccacttcgcctttgaacagaccgaactccagcttgaagtccaccaggatcaggcccgcatcgtcaaacagctttttcagcacatcgttagctttgtaggtcagctcctgcatacgcgccaggttctctttgctcacccagccaaaggtttcgcagtaggattcgttgaccatcgggtcgtgcatggcgtcgtttttcaggaacaggtcgaacagcggtgggttgagctcgatgccctcttcaatccctaagcgtttcaccagcgaaccggcagcgcggttacgtaccacgcactccaccggcaccatatccagctttttaaccagacactcggtatcggacaacagcgcttccatctgggtcgggatacccgcttccgccagcttgctcataatgaaatggttgaacttgttgttcaccatgcctttacgatcgaactgctcaatgcgagcgccgtcccctgctgacgtatcgttacggaattcgagtatcaacagatccgggttttcggtgctgtataccgtcttcgctttaccacgatacaactcagcttgcttttgcatctttgtcactccagtgatgattaacgataaaaatttgtgcttttctgccgacgcacacgtttgcgtcactatacattaaaaagggccggattgctccagccctgttaattacttacttaatgcagcctggaatacggcaaccagggcatcattttgcgactgcgtcagcgtatggcctttcgggtcgatgaactgcagactgctgcggttatcgaggtccccgacctgcagtttataatcgccggaaaccagctgcgggtcgcgggcgcccagatcggtccagccgctgtcggaaagcggtttgtaggtgacggagaagctgccctgagaacgagagctatcggtgaccttcatgcccactttttccagcgcgcccggcaggcgttgccacaccaggttaaacggcgcgcgaacgatcagcatcggcaggccggtatcatcagcgccgctctgcacgtcgaaggtcgccccggcgtttttctgcgcggcgttctgcgcgctggtggcgttcagatccagaccttcggagatgacgttcagcatggcggtactgtagcgctgcagcgaagccggatcggcaacaggtttacccgcctgctccagattcaccagcttcacgatcaccgcctgctgatagccctgctgcttaactgagatttgatagcgaccacgatactgctggtcttcatcgaggcgattccattcgacccagtcggtattcagcgtctggctggcatcgtcgcgtttcgcgatagtgtagtttttcgactgcacgatgcttgccacctgcgcccacagcgaaccgctgcgcccgttttccaccatcagcgtcgcggtatcaccgttaaactgcgtacgcgcgccgctgaccagcgccagtggctgggccggcggacgaatgtccagggctttgccagtgttaccggtgctggtcgcaaccggaatattataatcacccacctgaatcggcaggatcatccctgctggcgcgtgaagttcactaagcggcgtagcctgcaaataggcctcgtcgccgctcacctgacgcttgtagcgcgagtcagaactacaggccgcgaggagtagaaccagcgaaacacccgcaaccttcgccaggcgcgacttctgtactgagtaagccatcaaatctccctaaactttacagcaaaccggcatgcttcagcgctgcggtcacaaccttaataccgttttcggtaatcggggtcatcggcaggcgtagcgtatcggtcgccacaagacccaacgccttacaggcccatttgaccgggatagggttgggttcgacaaataatttggtatgcaatggcatcagacgctggttaatcgcacgagcttcggcaaattgacctgctagcgccagtcggcacatctcggccatttcgcgcgccgcaacgtttgtcgttacggaaatcacgccatgaccgccaagctgcataaagtccattccggtcgcatcatcgccgctcagcagaataaagtcatctgaaaccagctctttgatctgatgaacgcggcttaagttccccgtcgcttccttaataccgataatatttttaatttccgccagacgaccaacggtttcaggcagcatatcgcaaccggtacgggacggcacattatacaggatttgcggcaggtcagtatgttctgcgatagctttaaagtgttggaacagcccttcctgggtcggacggttgtaatacggcgttaccgtcaggcagccaaccacgccgctatcgttaaatcgcttggtcaggctaatcgcctctgcggttgcatttgcaccggtaccggcaatgaccgggatacgcccgtcggccagctccagcgtctgcatcaccacatcaccatgctcttcatggctcaatgttgcggactctccggtagtccctaccgaaacgatcgccgaggttccgctggcgacatgataatcaatcagttttttcaggcttgaccggcagacgttgccgttttcatccattggcgtgacaagcgctacaatacttcccgtaaacatgggccatcctcagagcataagtgggacaagattctcaatgttacgtttggagtcgtaataaaagcaagagacccgatgccatcagggatgttgtatgccggttttttttatgctttcctaacgttacctcacctttttaaaggaagaacaggtttgacagcctcattacaacactatctggttattaccgcgttgggtgctgaccgcccaggcatcgtgaatacgatcactcgtcacgtcagcagctgcggctgtaatattgaagacagtcggctggccatgcttggcgatgagtttacgtttatcatgctgctttccggctcgtggaatgcaattaacctgattgaatccactctgccgctgaaaggcgccgagctggatctgcttatcgtgatgaagcgtacaaccgcgagaccacctcaggcgatgcagaacaccgtctgggtacaggttgaggtgccggattcgccgcatatcattgagcggtttacggcgctgtgcgatacgtggaaaatgaacattgccgagctggtttcccgcactcagcccggagcgaacgacgagtcagcacagctttttattcaaatcaccgcccacagcccgactacgcaaaatgcatcaaatatcgaacaagcgttcaaagccctatgtacagaactgaatgcacaaggcagtattaacattgttaattattcacagcatgatgaacaggatggagtttgagtgatgaacccactgaaagccggtgatattgcaccgaaatttagcttaccggaccaggacggcgaggaagtaaatttgaccgacttccagggacagcgtgttctggtttatttttatccgaaagccatgaccccgggctgcaccgtacaggcgtgcggtttacgcgataatatggacgacctgaaaaaagcaggcgttgaagtactgggtatcagtacggataaaccagaaaaactctcccgtttcgccgaaaaagagctgctgaacttcactctgctgtctgatgaagatcatcaggtatgcgagcagtttggtatctggggtgaaaaaacctttatggggaaaacctacgacggtatccatcgtattagcttcctcatcgacgccaacggcaaaatcgaacatgtgtttgatgatttcaaaaccagcaatcaccacgacgtggtgctgaactggctgaaagaaaacgcctgacgctaagataaacgcaagacgccgggtcgttctcaaccacccggcgtctttttttagggcattccttgcggcttcgcgctaatgctcgtcttccactatcaggccatccggccaggcgtgcaccaccgctttgatgagcgtcgccagcgggatagcgaagaacacgccccagaatccccacagaccgccaaaaatcaccaccgacagaataatcaccagcggatgcaggttaacggcttccgagaagagtaccggcaccagcaggttgccatccagcgcctgaataatcaggtacaccgcaaacaggctccagaactcggttcccgcgccaaactggaacagcgccacgcccaccaccggaatggtgaccacaaacgcgccgatataggggattaataccgagaaccccaccagcaccgccagcagcagcgaatagttgaggccaaaaaggataaagccaatccacgtcgccacgccgacgacgatcatctccagcaccttaccgcgaatatagttggtaatttgctggttcatctctttccatacctgcccggccaggccgcggttgcgcggcagcacccggcgtacggcgttaagcatctgctctttatctttcagcagaaagaaaaccatcagcggcaccagcaccagatagaccgccagggtcagcagcccgaccagggaggccagcgaatatttcaccaccgagtcgccgacggttaacatccggctgcgcatattctccgccatcgcgtcgataatgccggcatccatgagggccggataacggcgcggcaccgtggcggcgaaatcggaaagtttattcagcatcccgggcatatcgcgaatcagataaatgccctgctgccaggcaaccggcatcaccacaaacgccatcagcagcagaatgccgacgaacagaatcagaacgaccgaggtggcccaggtacgtgaaaacccgatacgctccagtctgacggtgggccactccagcagataggccagaacaatcgacactaacaaaggtgccagcaggccgctgaagaaaaacataatgccgaacccagccagcaaaatgaccagcagcgctatcgcctccgggtcgctgaaccgacgacggtaccactgcattaacatctggagcataaaacccttccctgaagagcggaactgtaacaatctcaggaattgtatcgaaatgtcacaaaaaagacttcgctttttatgggtaaaaccacaaacattactggccggatgaatatcatatttgcaacgccgcgaacgacggctaaactcgctggacctgcttgcggtcagggaacattacgccgcacaatcggtcaaactggcacacctacattacaggacagaggttatgttcaggcagttgaagaaaacgctggtggcgaccgtcatagcgtcgctgacgctgggttcaatattacctgcttttgccgataccgcagacacgctgccggacatgggcacctctgcaggaagcacgctctccatcggccaggaaatgcagatgggagattactacgtgcgccagctgcgcggcagcgcgccgttaatcaacgatccgctgctggtgcagtatattaacggtttaggcatgcgcctggtgtcgcacgccaattccgttcgcaccccgttccacttttatctgattaataacgatcaaataaacgcctttgctttcttcggcggtaacgtcgtactgcactcggccctgttccgctactcggataatgaaagcgagctggcgtcggtaatggcgcacgaaatttctcacgtcacccagcgccatctcgcccgcgcgatggaagaccaaaagcgtaacgctccgctgacctgggtcggcgcgctggggtcgattctgctggcgatggccagcccgcaggccgggatggccgcgctgaccggcaccctggcgggcagccagcaggggctgatcagctttacccgtcaaaatgaagaagaggccgaccgcattggcattcaggtccttcagcgctccgggttcgacccgcaggcaatgccggcgtttatgggtaagctgctcgacgagtcgcgctactccacccggccgccggaaatgctgctgacccaccccttaccggaaagccgtctcgccgacgcccgcaaccgtgcgaaccagatgcgcccggttgtggtgcagtcctccgctgacttctacctggcgaaggccagaacgctgggcatgtacacctccggcgacaataagctgggcaacgacctgctgagcagctgggaaaaaggcaatattcgcgagcagcacgccgcccagtacggccgcgcgctgctggccatgggcaataacaattacgatctggcgcgcaaaacgctgcagccgctgctgagcgccgaaccgcagaacgcctggtaccttgacctggcgaccgatatcgatctcgggcaaaagagagccacagacgcgattaatcgcctgaagggcgcccgcgagctgcgtactaatccggtgctgcagctcaacctcgccaacgccctgctggaaggcgggcagccgggggaagcggcgacgatccttaaccgctataccttcaataataaagatgacgtcaatggttgggatttgctggcgcaagcggaagctaaactgggaaatcgcgatcaggagctggcagcccgagcggaaggcatggcgctggttggccgactcgatcaggccattaccctgctcagcagcgccagctcacaggtaaaattaggcagcctgcagcaggcccgctacgatgcgcgtatcgatcagctgcgtcagctgcaggaacgcttcaaaccgtaccagaaaatgtaaggagacctcatgtccgatacggtcaaaatctatcacaacccgcgctgctccaagagtcgcgacacgctgagcctgctgaaggctaacggcatcgaccccgaagtggtgctctatctggagacgccgccggatgccgccacgctgcgccagctgctgaagatgctggggatggccagcgcgcgcgacttaatgcgccagaaagaagatctctataaatccctcgatctcgcaaacccgcagcttagcgaagatgcgctgatccaggcgatggttgataatccaaagctgattgaacggcctatcgtcgttagccacggcgaggcccgtatcggtcgcccgccggagcaggttctggaaatcgttaactaagttgttgatcctcaggccgcggcccgctaaagcttgaggatctctttcacgaaaggaatggtcagcttgcgctgggcggtaatggaagcgcgatcgagctgatcgagcgtcataaacagcgaacgcatttcgcgatccagccgcttaagcaggaaccgacagacgtcttccggcatttcgaaaccgcgcagtctggcgcgaagctgaagcgcctggagcttgtcttcatccgacagcggctgcagcttgtagatttgcccccagtcaagacgcgaagccagatccggcaggccaagcttgagctggcgcggcggtcggtcgccggtaatcaacagccgggttttaccggactcgagaatgcggttgtagaggtcgaaaatcgccatttcccacagttcatcgcccgctacgcactcaatattatcgatacaaaccagcgacaggtgctccatcccgtccagcacttcaggaacaaaccacgtccgtttatccagaggtacgtagcccaccgcatcgccgcgctgggagagctccgcgcaggccgcgtgcaggagatggctgcgccccgccccttcgcgtgaccagatgtagatgtatccgctatgttcctgccgcagcacgttctgaagggcggcaagaagagaagggttatcgcccggccagaaactcgcgaaagtttcatcatcgggaagatacagtggcaaagagagctgtgccggtgcgttcagatggacctcaacataggcttgcagaaaaacgcggagagtttagcacagaaatacgcaaggagagaaccgggcaggatcgccgcccggtataaggatcaatgttttgcttcttcgctatccgcagcgtcgagaaccacctcttccggacgcagcacgctaatcagtttgaagatcaggctcagcccgacgccaacgatggtcgccagcgccatgcctttcagctcggcggcgccgatatgcacttttgccccgctgacgccgatgatcaggataacggaggtcagaatcaggttctgcgccttgttgtaatcgactttagattcgatcagcacgcgaatacccgaagcgccgataaccccgtacagcagcagtgagacgccgcccattaccggcagcgggataatctggatcgccgccgccagcttgccgacgcaggagagcagaatcgcgatgatcgccgcgccgccgataacccaggtactgtagacgcgggtgatcgccatcacgccaatgttctcgccgtaggtggtgtttggcgtggagccaaagaagccggagatcaccgtagacaggccgttggcaaacattgaacgatgcaggcccggatcgcggatcagatcttttttgacgatattggccgtgactaccagatgtccaacgtgctcggcgatcaccaccagcgcggcggggagaatggtgaaaatcgcaaaccattcaaagcgcggggtgtagaaggtcggcagcgcgaaccagtgggcctcggcgatgggcgtggtatcgacgacgcccatcacgaaggagagcgcgtagccgaccaggacgccgattaaaatcgggataatcgccaggaaaccgcggaacagcaccgaaccgaaaaccgtcaccgccagcgtcaccatcgaaataataatggttttgctgtccggcgattgcccgtcagcgggcagcagaccggccatattcgccgccacgcccgccagctccaggccgataaccgcgacaatcgcgcccatcgccgccggtgggaacatcacgtccagccagccggttccggcttttttgacaataaaggagacgatacaaaacagcacgccgcacatgataaagccgccgagagcgacttcgtagcccagcggcagcagaagcagcaccggggagataaacgcaaagctcgatccaagataagccggaattttgcctttgcagatgaaaagatataacagcgttccgatgccgttaaacagcagtaccgtggccgggttgatatggaacagaacgggcaccagtaccgttgcgccaaacatggcgaacagatgttgcaaactaagcgggattgtctgtaaaagcggcggtctttcactcaccccgatagcacggcgcgtcatggcattttcctctgagagtcgtttgttgattgctgttggtgtgttttattcaaaaaaaagccgactctcaaagtcggctttttctacttcatcatttatttcgtaccaaaaatcttatcgccggcgtcgccgagccccggaataatgtatccgtgctcgttcaggccctggtcgatggacgcggtgtacagctcaacgtccggatgcgctttctccagcgcggcgatgccttccggcgccgccaccagaaccagcaccttaatgctggagcagcccgcttttttcagcaggtcgatggtggcgatcatggagccgccggtcgccagcatcgggtcaaccaccagcgccatgcgttcgtcgatgttggataccagcttctggaagtaaggcaccggctcaagggtctcttcgttacgatagatgcccaccacgctgatacgcgcgctcggcacgtgctcaagcacgccttccatcatccccagacccgcgcgcagaatcggcactacggtaattttcttgcctttgatctgctcaatttctaccgggccgttccagccttcgatggtgactttttcggtcgccagatcggaagtagcttcataagtcagtaagctgccaacttctgaggcgagttcacggaagcgtttggtgctgatgtcgtgctcacgcatcaggcccagcttgtgtttgacgagtgggtgtttcacttccacgatcttcattctctttctcctctgaggggcagccacaaaaaaaatcgccggattataccgcctttttccttttacgccatagccgatatgtttgaccgggatcaaccaaaatgctttacgctgcctgagccagtataagacaaaataaaaaaaccccgcgaaggcggggctgaatggggctttacggccgtttatagcttttcgccgttgctgccgataacctgctgataccaggcaaaagatttcttacggctacgcgccagcgtgccgttgccctcattatctttatccacgtagataaagccgtagcgttttttcatctcaccggttcccgcggaaaccaggtcgatacagccccacggggtatagcccatcaggtcgacgccatcctcaacaaccgcttttttcatttcggcgatatgggcggaaaggtagtcaatacgatactggtcatccaccgagccgtccgcttcgcgcacgtcgatggcgccaaagccgttctccacaataaacagcggcagctggtaatggtcccagaaccagttcagggagtagcgcagcccgaccggatcaatctgccagccccagtctgacttctgcacgtacgggttggaaaccaggctcttgctttcatcgtaatccagctgcggattatcatccgttgctttcgtggcgaacgacatatagtagctaaagccgatatagtcgacgcagccctgagtcagcgccacgcggtcttcttcggtgatgtccagcgcaaaaccgcgacgctcgaagtagttcagcaggtgctgcggatagcggccgcgcacgtgaacgtcggtaaaccagtagcggcgatgcatggcgttcatcgccatcatcatgtcgttgggcgcgcagctcagcgggtaaatcggacacatggcgatcatgcagccaatctgcaatgacgggttaatttcgcgggcggctttaaccgccagcgcgctggcgaccagctcatagtgcgccgcctgaaacatgaccggctcgcggtcctcccccggcagatatttcagtccggagttggtgaacggcgcaaaatcttcgtggaagttggcctggttattgatctcattgaaggtcatccagtacttcactttgtgctggtagcgggtaaataccacccgggcaaagcggacgaagaaatcaatcagtttacggttacgccagccgccgtactccgtcaccagatggtacggcatttcgaagtgggagagcgtaatcaccggctcaataccgtgcttcaggcactcatcgaacaggtcgtcgtaaaactgcagcccggcctcgttaggttcttgctcatcgcccagcggaaagatgcgcgtccaggcaatggaggtgcggaagcatttgaagcccatttcggcaaacaggcgaatgtcgtctttatagcgatgataaaaatcgatcgcttcgtggttggggtagtttttccccggcagcacgccatcggtgatttcgcgcggtacgccgtgcgcgcctgcggtcatcacgtcggcgacgctcacccctttaccgccctctttccagccgccttccagctgatgcgccgccaccgcgccgccccacagaaaaccttctttaaatccggacatgttctctccctatgcgcagtcgccgctctgcgaccggtattgctgattgaaatggtaaaccgcgcctaccagcccggcatcgttgccgtggctgacggtgtcgatatattccgcaatgccaaaccaggccagatgttcgcgcagcagcgccagaaagcccggtcgttccacaatcccgccgccgatcaaaatcgtttgcgggtcgaataagttgacgaggttgtaaagcccggtacccaggccgttaaagaattcagcgaccagacgtcgacaggtggcgtcgcccgcatcgtagcggtcaaaaatctcttcgccagtgacgtcatccagcgccttgccgatatgttcagcgtagcgatggcgcagcacgcgcagcgtgcagttttcgttcatcgaatagcgccgcacatcgcgggtgcccggacgcgcggtttgcatatagccgaactcgccggcgcggaagcgcgcgccgtggaccagctgattattacaaaaaatcgccccgccgatgccggtgccgatggtcaggaccagaaagttgctcatgtcggcggctttaccccgccagcgctcggccagcagcacgcagttagcatcattctcaatggccacgggcagccgcacctgctgctcaagccagcgcttgatggcgaagttatcgaatttacggatggcgccgcccatttcgataaagccggtgtgcgggttaacgtagccgggcgcgctgattgccaccccttcacacgccgggtgagcggcgatccacgccagcatcgcctgcaggatctggtcgccgtcgctgtcgacgatgttctgctttcctttctccagcagcgtgccttcgcgcgtcattacccccatttttaacgccgtgccaccgatatcaaatgcggcaatgttcatcctcagctttcctccagaatccatcacattcgcggtttatctctccagaaatcagaaaagaaaccggtttcactggcatgatgattattcccgacaacgctggcaagcagaagaatgtacccggtttcattttcgtgaacagtatcaaatttgcgcacttaacggccgttttacatcggctgcaaagcaggctcgcaaacgtttgctatccctgttagaattgcgccgttttttattgctaccgcaaacgcgtggagacttcgcagtgaccgataaaacctctctcagctataaagatgccggcgtggatattgatgcaggcaacgctctcgtcgaccgtattaagggcgtggtgaagaaaacccgccgcccggaagtgatgggtggactgggcggattcggcgcgctgtgcgcgctgccgcagaagtatcgcgaaccggttctggtctccggcaccgacggcgtcggcaccaagctgcgtctggcgatggacctcaagcgtcacgacactatcggtatcgacctggtcgctatgtgcgtaaacgacctcgtggttcagggcgcagagccgctgttcttccttgattactacgcgaccggcaaactggatgtcgatactgcgtcgagcgtaatcagcggcattgccgaaggttgtctgcagtcaggctgcgcgctggtgggcggcgagacggcggaaatgccgggcatgtaccacggcgaagattatgacgtggccggtttctgcgttggggtggtagaaaaatcagaaattatcgacggcagcaaagtggccgatggcgacgtgctggtggcgctggcttccagcggcccgcactctaacggctactctctggtgcgcaaaattatcgaagtcagcggcgttgacacgcaaaccaccgatctcaacggtaagccgctggccgaccatctgctggcgccgacccgcatttatgtgaaatccgtactcgacctgatcgccaacgttgacgtgcacgccatcgcccacctgaccggcggcggcttctgggaaaacatcccgcgcgtgctgccggacaacacccaggcggtcattgatgaatcctcctggcagtggccggacgtgttcaactggctgcaaaccgcgggtaacgttagcagccacgaaatgtatcgcacctttaactgcggcgtcggcatggtcatcgcgctgccggcggaagcggcggataaagccattgccttcctgaacgacaaaggtgaaagcgcgtggaaaatagggtatatcaaagcctctgattccgaacagcgtgtggtcattgaatgaaaaacatcgtggtgctgatttccggtaacggtagcaacctgcaggcgattattgacgcctgcgcccggaaaaaaatcaacggcaccctgcgtgcagtcttcagcaacaaggccgacgcgttcggccttgagcgcgcgcgcgcggccaatattccggctcacgcgctcgccgccagccagtttgccaaccgggaagctttcgaccgcgagctgatgcacgagatcgatgcttacgcgccggatctggtggttctcgccggctacatgcgtattcttagcccggcttttgtcgcccactaccaggggcgcatgctgaatatccacccttccctgctgccaaaatatccggggctgcacacccatcgtcaggcgctggaaaatggcgatgaggagcacgggacgtcggtgcattttgtgaccgatgagctggacggaggtccggtggttctgcaggcaaaggtaccggttttcgctgaagataccgaggacgacattaccgcccgcgtacaggcgcaggaacacgatatctatcccctggctatcagctggtttgtcgatggccgcctgcgcgcggaaggaaacgaagcctggcttgatgatgttcctcttccaccgcagggatatgcggcagaagagtaaactttcccgcctctggcgtccgctggaggcgtttttcattagctcaggtttcccgcacggatgaccgctcgcatttttccagacacagcgcttgcgtattccagcctgccggtaggggaactggacgctgccaatcaagttctctgatgactaaatcggaaaccccctgcgcaaacaggacgggtagccctccgggatagggttcgactccccaggcctttcccgtttctgggttgaggcaccaggcgttatcgacacccattcctgttggcgaaagaggattacacggcggacgaatatcataattcccctgccaaccgtggcaatgcagtcgctgggtaagctgaatactctcgagtcgtattcggttgatcatggaaggggtttcactgtgcatattgatggcgccttcacattctccgcaaagcccacgaaactggatttgcgtaatctcaccgggctcgatctgcggattcctgcgacgcgcggagaggaaaatcgggtccgcctccccccagtgacaggctggcgccgccacacactcaaaagtcatgctggtaaagagcattcttcgtagccggccgccatctcgtgaaatcaggccgataccgcgattcgaatcatagatagtgcagttgctgaccacaatatcttcaatatcttgccaggtttccgtgccgattttaaaagcgcagctttttgagcgcagggtacaattgacgatcgtcacctgacgtaaaggacgttggatagccgccggtttatcggtggttttcagacaaattgcatcgtccgccgcactaaaaaaactattagcaacgtgtacctgctgacagctatcgatatccagcgcatcagtatttgccattgtcagatcgttatcgacggtaatgccatcaatcaccacctgtgaacatgaaacaagatgaattgtccacatcggcgcatggtgtatacagatattttccagcctgacccgctggcaattttccagaagaatcatgcgcggccgctgttcggcgggcgtgcgatagcccatatcatcaaccgatgaggagaaccaaccatcggcattaccgtaaatagtaccgcccccacaaatcgagatattttcggcatccagggcatagaggaaagcccggtctgagcactctgcgcggcttaaggccaccgcctgggtgaaatcagcataattatcgctgacgatgagttctgcaccgggtgacaaccacaggcaggtgtttgaccccatgcgtaacccgccaaggtaatattttccactttccaccaccagcgtaccgccgcccgcttgcgataaggtatccagcgctttttgaaaaatctcagtgtcgcgagtaataccatctgcgtgcgggcgccagtttgaaagaaaaatgttcataggatttcctgagatgaaatgggaatgctatctgaacacagtcattatcgatcgccgtagggcaaaacagcatcgacataagtaatctgtcgccgttctcacaacgtccttttttcccgcagttcatctgtgatttcggacacatttcttctcgctccttccgcagaaatagcgatggctatcacatttcattttttcgcccgtcctaatactgccggccatatcacgctatttatttcatttaatccgctttctccgccccgctctcagttcttaacaaaagcgccttaatgacgattccgcaaaattttcacctcttttactgtgctacttcctctttactgacagaagagacaggaaaaatgacgaggacagtaacggcaccacgggaagtaaaaacacgcaatattctctgctgggggatgggcgatatcttcggcagcggggcaatgacgatcaccgggctttggctgctttatttttatattgaagtggcgggcctttctcccgccgccgcagcatccatttttgcgatcgccaaaatttgggatggcatcaccgacccgatcatgggttatatcaccgacaatattcgcacgcgctgggggcgacgccgaatattctttattatcggcgcgccgctctccttttgctttgccctgatgtgggtaagcggttttggctatgcctggtatcttggtacttatttgttattcagcaccgtttttaccctcttgatggtgccctacgatacgctgcctgcggagatgacctcgcgttacgatctgcgttcaaaaatgtctggcgcgcggatgctatttgcccaggcgacagcgtttttatctgcacttatcccaggacaaattttggcgcacgtcgccgataaatcgcaggcatttttatatatcggcctggtcttttccgtactcttcgccctaccgtggatcttcgtttggcggggaacctgggaacgggagaatctcccgccgccttcgactcagcgcgggatggggaaaacaattatttcgctgtatcgagaaatggcttcaactttccgtttacgtacttttcgcattcacatcatgatgtacgttggcggagccgtcgccctggatattttcggctcgctgtttatgcactatcttacatatgtacttcaggtcggcgcatccttagcttcccaggcaatgagcctgatgacgctatttcaattttttgccatccctttctttacctggctttgtattcgcatcggcaacggcaacgcctacaaactggcaattgcactgattatgtgcgctctactgtggttcagccagctttccgcctccattagccatttatcaggattcttattcggcggggccatcgtgatgggcatcgcacgcggcggaacctatcttatcccatggaacgtctacaactttttacctgatgtggatgaagcttataccggcgtcagacgtgaaggcatttacgcgggcgtcatgatgctaacgcgcaaattttcccaggcgctggccctgtttattgttggactggcgctggaggcgtttggctttaccaaaggtgcagagtcgcaagatgccgccgcgctaaacggcatctggtgggtattccttatcggaccgggtttactcactctgctggcgatgtacggcgcgtttcgctttcgtctaagccaggagtgtcataagacgcttaccttcgagctagagcgtctgcggtctggcggtaaacccgaagatgcatcaacgcaggtacgacaaaccgtagagttacttaccgggcatccgcatatgaatacccactggcagcatacagctgaaacgacaacgcaagggaatctctatgtcgcagaaaataagccatcctgaaatcatccgtcttatcgaaaaactgatcgatagcctcaccgcaattcaggatgacaatggtcaattcctgcagcgcctgcctgacgggcgcgtgattgatacaaaaggctgggctggatgggaatggacacatggtatcggcttgtttggtctctaccgctaccatgaacttaccggctcatctcgcgccaggcagattattgacgactggttcagcgcccgtttcgccgaaggaacgccggagaagaatattaataccgcgatcccttttttgacgcttgccagtcgctaccagcaggacgcgcgtcacgaatggcgcgcgtatctggaagtgtggggagatgcgctttatcgtcagattccgcgcactgatgaaggctgcatgcagcatgtcacctacgaaaacgcgcattatcagcaaatctgggatgacaccttgatgatggcggtcctgcctctggccaggattgggcttttattgcaaaaaccttactgggtagaagaagcaaaatttcaatttctacagcacattcactaccttacggatagaaaaagtggtttatggtttcacggctggaatttcgacggcaggcatcattttgccggtgcccgatgggctcgtggcaatagctggataacactggcgattcctgaactactggaaatgctcaatcttgatgagcatgacgccttctatcgccagctctgtaacatcctgcagggccaggtatccgccctcgcccgctgtcaatgtgaaaacgggctatggccgacgctattagatgatgcaacaagctacgctgaagcctcagcaacagggggatttgcagccggtatcctgaaagcgatacgtctcggctacctcgacgacagctatctacccgttgccgaacgagcaatcgcaggcattattgagcatatctcgccggagggagaattaacccaggtttcatttggcacggcaatgggacacgaccttgaccattaccgacgaatccccctaactgcaatgccatatggccaggcgctggcgatactcagcctggtcgaggctttataccgcacgcgttaatacctaatgcctgagtgccgatagttcgctactcaggctatcagccaggctacgaacccgacccgcatcgaacatgatataaaacccaggcgatgcttcgttcatctgctggcaaagcatctccatttcggatgccccctgatacaacgcctgcacgttgatatggcagatttctctcatactccagctattctccacctcacgagcaaaatgcagcgtaaaaaaagctttctgtgcatgcgtgaacagctgacagtagagtgcgagcccccgccattcattctgccagagccgatagagcgccgtgggaaacgcggcattctcggcaaactccagcgcctgcgcgcatagcttcagggcatctgccgctacctcatccttctcttgcgcaattcgcgtgaggttttccatcgatatttgcggatcgtcacgcgtgaagtggatatccttggccgaccccggcagccagtgattacgcgccagctggctgtacaaactccatactgcctgaccgtagctttccggtagctgactatggcggtgaaaaacgtgatcgcgaacataaatcgcctggtaaagcacctccgttgcctgctcaagtagctgctgaaaacggcgggtgactgtaacatcggggcaccagccgtaacgctcagccagccagagatccaacagctgctcctgggtctttcccgcaccatgacctaacagctggctacaggcaaacagattgcattcgcttaacgtttccggtatccagtggttatcaacgctctcccaactggttttgcatatcgcaccggtgattctgggattcgcgctttggcaccacagcagtcggccttttaactcatcaatgcgcaagaaaggcataacgccccagcccacctcttcgcctgctaaatcaatatcaacccagacgtctcgcatagtgacctgaagcagtgcgggattatttggaaatgctggccagaaacgttctggcgttaacttgatcgataccgaaacggttggcggaagcggctcgatagcatcgagaacggtaccaagatcatcattacttgcagggaaaacccgcaaaaccagatgtttattttgtgcggtaaccacctggctgagcgcttgaaaacaacggcgatagagcacaaagctttgcgacggttgccgggtattttcaggctcatccctggcgtttatatcccatttagggcgcgtaatcggcaataaaccatcggtgctggaaagcgcaataattagccctgttaaagctggaattccctgacaaacgccgcgaattttgtctgtcagccagcggctccagaaatccacatcaaaaaggatcccttgctggttatccagtagatacttatgcgacaacagcaattccgttgggaaatccagctcttttgcctgtaaataaaatcgcagcccctgctcgcggcaatacatggcgagacgattaaggtagatacagcgcgctctctgctggctggaaacgctatcgttatagtggaaaggcgtatatcccttcggggacaccagcttaccgaagagatctgcctgccccaccacgatagcattaaagccatgctgagaggcatacctgaccagattgcataccgatgaccagttccatatatcctgattattcagttctaacgctcgcgtctcccacatggttttgctcctgaatctcaccttgccttgaacataacgtaagtcgcgaaaatcgtctgtttttcttcgctatatactgaaagaaaacagtcatacttctttgacataattggacattcagtggcaaagctcgccataatgaaatagcaacatacatctaccggagtgtgagctgtaatgggccaggaaaagctatacatcgaaaaagaactcagctggttatcctttaacgagcgcgtacttcaggaagcggcggacaaaagcaacccgctgatcgagcgcatgcgctttttagggatttactccaataacctcgatgaattttataaagtgcgctttgccgagctgaagcgccgcatcatcatcagcgaagaacaaggcagtaccgcacactctcgccatctgctgggcaaaattcaggcccgcgtgctcaaggccgatcaggagtttgacggcttatacaacgagctgctgctggaaatggcgcgtaaccagattttcctgatcaacgaacgccagctctccgtcaaccagcagtcctggctgcgtaactacttcaagctgtatcttcgtcagcacatcacgccaatcctgattaaccgcgaaacggatctggtgcagttcctgaaggatgattacacctacctggccgtcgagattattcgcggggataccatcaattacgcgctgcttgaaattccgtcagacaaggtgccgcgttttgtgaacctgccgccggaagcgcctcgccgccgcaagccgatgattctgttagataacatcctgcgctactgcctggatgatatcttcaagggcttttttgattacgacgcgctgaacgcctactcgatgaaaatgacccgtgacgccgaatacgatctggtgcacgagatggaatcgagcctgatggagctgatgtcctccagcctgaaacagcgcctgaccgccgagccggtgcgcttcgtttatcagcgcgatatgcccgacgcgatggtcgaaatgctgcgcgataagctctccatctccaactacgattcaatgctgccgggcggtcgttaccacaactttaaagactttatcggcttcccgaacgtcggcaaagccaatctggttaacaaaccgatgccgcgtctgcgtcatctgtggtttgataaattccgcaacggctttgacgcaatccgcgaacgcgacgtgctgctttactacccgtaccatacgtttgaacacgtccttgagctgctgcgccaggcctctttcgacccaagcgtgctggctatcaaaatcaacatctaccgcgtcgcgaaagattcacggattatcgactcgatgattcacgccgcccacaacggtaagaaagtgacggtggtcgtggagctgcaggcgcgtttcgatgaagaagccaatattcattgggctaaacgcctgaccgaagccggcgtgcacgttatcttctccgcgccgggcctcaagatccacgccaagctgttcctggtttcgcgcaaagagggcgatgaagtcgtgcgctatgcgcatatcggcaccggcaacttcaacgaaaaaaccgcgcgtctttacaccgactactcgctgctgaccgccgatgcgcgcatcaccaatgaagtccgccgggtatttaactttatcgaaaacccctaccgcccggtcagcttcgattatctgctggtgtcgccgcaaaactcgcgtcgcctgctttatgagatgatcgatcgtgaaatcgccaacgcgcaaaatggccagccgtcgggcatcatgctgaagctgaacaacctggtcgataaggggctggtagaccgtctctacgccgcttccagctccggcgtgccggttaatttgcttattcgcggtatgtgctcgctgatccccggtctggaaggaatcagcgaaaatattcgcgtgaccagcattgttgaccgtttccttgagcatgaccgcgtttattgctttgaaaacggcggcgataagcaggtttggctatcgtccgcggactggatgacgcgcaatattgactatcgtatcgaagtggccgcgccgctgctggatccgcgcctgaaacagcgggtgctggatattttcgatctcctcttcaacgatacggtgaaagcacgctatcttgataaagaactgagtaatcgctacgtgccgcgcggcaatcgccgcaaagtgcgcgcacagatggcgatatacgactacctcaaatcacttgaacagcccgattaacctatgccaataaacgaaaatgcccctcggccgcaggagttcgctgcggtcgacctcggttcgaacagttttcatatggtgatcgcccgtgtcgttgacggggcaatgcagatcatcggtcgcctgaagcagcgcgtacatctggccgacggcctggatgaaaactctgtactgagcgaagaggctattgcgcgcgggctgaactgcctgtcgctgttcgccgagcgcctgcagggttttgacccatcaagcgtctgtatcgtcggcacgcacacgctgcgccaggcgacaaacgccgcagagttcctcaagcgcgcggagcaggtcatcccctacccgatcgaaatcattcccggcaacgaagaagcgcgtctgatttttatgggcgtggagcacacgcagccggagcgaggccgtaagctggtcatcgatatcggcggcggctctaccgagctggttatcggcgaggatttcgagcctcgtctggtggaaagccgccgtatgggctgcgtgagcttctctcaggcctactttgctggcggcgtcatcaacaaagagaatttccagcgcgcgcgtctttccgccgtgcagaagctggaaactctggcctggcagttccgcatccaggggtggaacgtcgccctgggcgcatcgggcaccattaaagccgctcacgaagtgctggtggccatgggcgagaaagacgggttcatcactcccgagcgcctcgagatgctggtcgaagagctgctgaagtataaaaacttcgactcgctaagcctgcccgggctgtctgaagatcggaaagccgtttttgcgcccggtctggctatcctgtgcggggtgtttgacgcgctggcgattaaagagctgcgcttgtccgacggcgcgctgcgcgaaggcgtactgtacgagatggaaggacgtttccgtcaccaggatatccgtagccgcaccgcgcagagcctggcgaaccagtacaatatcgaccgcgagcaggcgcgtcgggtgctggagaccaccacgcatatttatgagcaatggcaggagcagaatcccaagctcgcgaacccccatctggcggcgctgctgaaatgggcgaccatgctgcatgaagtcggcttgaatattaaccacagcggcatgcaccgtcattcggcttatatcctgcaaaacagcgatctgccgggctttaatcaggaacagcagatgctgatggccaccttagttcgctatcaccgtaaagcgattaagctggatgatttaccgcgtttcacgctgtttaagaagaagcagtttctgccgttaattcagctgctgcgccttggcgtgctgctgaataaccagcgtcaggcaacgacaacgccgccgagccttacgctgaaaaccgaggcaaaccactggacgctgaccttcccgcacgactggtttagccagaatgcgctggtgctgctcgatctggaaaaagagcaggaatactgggaaggggtacctgactggtggctgaaaatcagcgaagaagagaagcctgacgcggcaagctagtttcgcgcatatgggccggacgtccggcccattcgcttatcaatcctcaaccagcgcctcaagcggggccggtttgccgatatcatagccctgcatataatcaatccccagcgaaaccacagcctgccgaatctcgggcgtttcgacatattcggccaccacctgcatatttttcatcctcgccagaaggcaaatagaggcaacggcctgatagtccagactgctggtcaccagattacgaataaaactaccgtcgattttcagcagatccgcattcatcgttttcagccgcgcgtagctggcatagccggtgccaaagtcatcaatcgctacccgacagcccaggtcctgaagctgcgccagggttttccgcgcctgctcgggattggtcagtgaatggttctccgtcagctcaaaaataatctgccagggttcaatgtcataatgctccagcagcgtttttacctgctgatgaaaataactgttactcactgaaaacggcgagatatttatcgccaggcgcattccaggaagctttttgcgccgcttgtccataaagatcaacgtatgttcgaggacccagctatcgatacgcgccgacagtccaaactcgtgcgccactggtaaaaagacatccggcatgatgatttcatcgttgtcgttcagcattctcagcagaacttcatgatagctatccccccggatgccgacgatcggttgtgccatcagaacgaagcgatcgtgctccagcgccttcaccagctgattcattatcatgactttgtctttcagctcctgctgcgtattaatggcgccgcgacgctgtaaattttcaggacttccggtcgccagggaaaggtcagccgcgccgctgagttctccaagcagtaaatgcagatgcatcaccggagagcgaacgttgcaatagctgaatcccacgggcggctgcagcggcataccgttccagacaaagcgaaactttttgagatggtcaaacagcagggggactcgctgctgatggtcttcactgtgcagatggataaccagctcgtgcccggccatctgatagatatcctccccgggctgcaatagatcgccaagcgactcggccagcagctgcttgtactgaatgcgcaacagaacgccgtaatggcggcccaatatttccagctcgggaatgcgtaagaagcacagtactgaccaggaggatttatttaacgcccggctcagcgcgcggatattgggcaagcgtacaaccggatcaatgaaggccatccgccgcatacgcgcataaaaaattctctgctgcgtcgccagcatcgccatataggcgataataaatgaaaacaccagatagcttgaggagataatagccagctgattactgtaaatcggtgaatgcgggagatattgataatgaaagtggataataacaattaatataggggaccagaccaatgaaatgaagcgatagccaaaacgcatcgccccccacagcatcaccggcataagcaaggacaaggtataatttgtactaaaaatagtgctcgtactacttagcggcattaatagcaaaactaataaaattaacagcactaccgcccataaaataaactctaagggctttattttcggatcgatctgcaggcgaatctgagaaacaaaaccccgaatatagagcgggttgcggataattcgaatcagaaagtagcatagcggcacgccggtcaggcatccggccatcagggcctgaaaggtgataagcgaacgcaaacttaaggggttgaccccaatcaacccggtcgcgcgaggatggatccccaaatactcggcgagctgggaaaggataagaaagatcagcgatggcagcaacatttgccagaacaatcgttgaggcatcagtcgcacattgccatgcgagatttgctgccttcgcgggacaaaaacgcgatacccgccccagcaaaggacggtcggaataagaaagtggaaaatcacgccgatggaatcttccagcgccatgccgcgcgtaatggaaagcagcaaaccgacaacgatccccggtaaagcagcccagccgaaaaacagcatcaggctcagcactaacgccagaggtaaatagtaaagataaacttcattaccattcagtacagcaacggtgttcgcccatcttgccagggggagtaaaaggatgggtaagatgagcggcagcgaccaccatttatcccgatatcttctgtaaagtttaataatgttcatagatgctctacggataaccctaaatcctgcagggtatattcaggcaggcatccaaccaaccgtcataatcgcgcaaggaataacaacgcggaactggctggtgattttagttgtcggtgagaatagacgattgatataaatcaaaaaatcacgtcgctaatattaataatgtcttttttttaacatcaatttgcgataagcagaaagcatgtaaatacgaggattatcttatataacattaattaatgttttacccctgggatttttacatcctcatcaattgacccttccgcgttactgtgccttaatacgcacatcgcccatcctttgggtatactttaaggaaccttttgtgagtcaggcacccagtatgcgtaaacgacatcgatttaaccgtcgcatgacccgtatcgtactgcttatcagctttatcttcttctttggacgctttgtctactcctccatcggtgcctggtaccatcatcaggacaaaaagcaatcgcagcaatccactatcaccgttgaaccttcagatccgctaaaaacgccggtacaaaaataagcgcggtacgctgttcagcaaccggcctgagagagcaaacgcagcacttcagcgatgcctttgctgatgattttatcctgccgcatgacgatgcctaactgccgatacaggcgcggagtcaacgattgcacgttcaggccgacgcgatcctgcggatcctctaccgccatacgcggcacgatgctgtatcccagtcccgctcgcaccatccgcttaatcgcctcaatgctgcctaactgcatgactggcacgaccatcagtccattatggcgaaaccagccgtcaatcagatcccgggttccgctccccgcttcaaaagcaattagcggcaatgattgcagaacctctggcgtcagcggcgagggcaggtcgtcctgagcatcgctaaaaataccgacaaactcttcatctaaaaccggcgtcaccgccaggctgcgtccgttcgccggaagcgtacaaaggcccagatcaagccggttctcctcgatagcccgaaccacttccagggtattgccaaccgtgaccctcaccgtcagcagagggtgatcctgatgcagcttctgcagcagcggcggtaacaggtggatacaggcggtcgccccggtacccaacgttatcgagccgctgatttctcgattgaattcgctaaccgattgcactgccgcgcccaccgccagttcaatccgctcgctgtgcgccagcagggcgatgccggccgccgtcgctttgatgcctcgtcctgttcgctcaagcagtctggtttggagaaattgttccagctgacgtacctgcagacttaccgcaggctgcgacagccccagcaggtcagctgcggcggaaaagcttccgcgctgtaccaccaggcggaacgtcgccagatttcccagattgagcgtcatcatcacaaagtttctcttataagggtcataaatggaccggcctgcctccacaatagcgtgcagggtatgctgccgacaacagcgtaacaaaatggacgatcatgaaaacatctgcaaaaccactctccgcgccgggcgccgtcacgcttgccgccgggtgcaaccagctaataaactggggagtctcattttatatgcccggcactttcgccagagctattgctcaggagaccggctgggccgcaacggaaatctactttggcctgactatcgccatgctgatgatggcgatgctctccccgtttgtcgcccggctactggcccgctttgggggccaacgggtggtggtcacgggtacgctgatgatttcagcgggctgcctgataatggcttacgtccagagtctaccgggctggttcgccgcctgggttctgaccggcgccgggatgcgtctggcgctctacgacgcgctgttcgccgcgctggtgaatatctatgggcaaagcgccagattaactatctcgcgcgtgacgctggccggcggcctggcttcggctctgttctggccgctcggcgccgggttgttgacgcagatggactggcggcatgcgctgctgatttatgccctgtttggcctgcttagcgcgatgctgctgtggaaaatgccaaatcacagactgccgtcaccgaaacggataatgcaacgccagcggctctcccgccgcgataaacgccctgccctcctgtacgcgtcgctgattgcgctggtaacctttgtttccaacggtacctcgacgcatctccccgagtatatcgccagcgtcgggcttcctgtcgcggtgggaatgctgtgggggattgggcaaaccggcgcgcgctttctcgaagtggcatccggttctgtccttacgccgttgcggctaacgatactgaccaccctgttgatgccgctctgctttgcgctcggcctgagcgggccatatctgtcgtgggcggccggcggatttgtgctgggttacggcgcgatcaacggcctgacgaccgtttttaaagccactctgccgctgcagctttttgccgccgaggattatgcccgacgaaccggtattttgttgattcccgcgcagctgctggccgccgcctcgccgtttgcctacgcgtggctgaatgattatctcgggataaggggcagtttagcggtttccgccgcgctggccctggtggtggcagctctggcgatggccgttgcatggtgtcagcgggagaatacgccagcggcaattgaagaacggggttgacagtagaaacccggtgtatcggtattcatcgtctcagggaatgccgtaattcggcgatattgttaagaaaaatgccattaatgacgtcaatcattaatggcattatttttttattcaattaacgcaaagaataaagtttattcccactcaatggtcgccggcggcttaccgctgatgtcgtacaccacgcgggaaataccgttgacttcattgatgatacggttggatacgcggccgaggaaatcgtacggcagatgcgcccagtgagcggtcataaagtcgatggtttcaaccgcacgcagggaaacgacccagtcgtacttacggccatcgcccatgacgccgacggaacggaccggcaggaatacggtgaacgcctggctcactttgttgtacaggtcagctttgtgcagctcttcaatgaagattgcgtccgcgcggcgcagcaggtcgcagtactctttcttcacttcgcccagcacgcgcacgcccagacccggccccgggaacgggtggcggtacagcatatcgtacggcagacccagttcgaggccaatcttacgcacttcatctttgaacagctcgcgcagcggttcaacgaggcccatcttcatctctttcggcaggccgcccacgttgtggtgagatttaatgacgtgcgctttaccggttgcggaagcagcggactcgatgacgtcaggatagatggtcccttgcgccagccatttcacgtcttccagcttcagcgcttcttcgtcaaacacttcaacgaacacgcggccgatgattttacgcttcgcttccggatcgttttcgcccgccagcgcagccaggaaacgcgcctcgccttcgacatgaacgatgttcaggccgaagcgatcgccaaacatatccataacctgctgggcttcattcagacgcagcagaccgttatccacaaagacgcaggtcaggtttttgccgatggcgcggtgcagcagcatggcggtcacggaggaatccacgccgccggacaggccgaggatcactttatcgtcgccaacctgctgacgaatgcgctcgatggcatcgtcgataattttggccggggtccacagcgcttcacactggcagatatcgcgtacgaaacgctccagcatgcgcagaccctgacgggtgtgggtgacttccgggtggaactgtacgccgtagaaacgtttctcttcgttagccataatggcgaacgggcaggtttcggtgctggcaacggtgacgaagtcagacgggatggcggtgactttgtcgccgtggctcatccagacgtccagcatcggcttaccatccgcgctcagcgcatcttcgataccgtgaatcagggcgctatcggtctgcacttcaacctgcgcatagccaaactcacgttcattagaggcttcaacgtggccgcccagctgcatcgccatggtctgcatgccgtagcatacgccgaataccggcacgccggcttcaaagacatactgcggcgcgcgcgggctgttatcttcggtggtgctttccgggccgccggaaagaataatgccgttaggattaaactcacgaatttgagcttcagtcacgtcccatgcccacagttcacagtagacacctaattcacgaacgcgacgcgcaaccagctgggtgtactgagaaccgaagtccaggataagaatacgatgtttatgaatgttatccgtcattgacgataattccgaggcaagtgatacaggttaaataaatcgcccggcgcgtggccgggcgatgaaaatcaggagcccatgcggtagttcggggattccttggtgatagtcacgtcgtgaacgtggctctcctggatacccgcgccgctgatgcgtacgaattccgctttggtccgcagggtgtcgatggtaccacaaccggtcaggcccatacaggaacgcaggccgcccatctgctggtgaatgatctccttcaggcggcctttataggcgacgcggccttcgataccttccggtaccagtttgtcggcggcgttatcggtctggaagtagcgatcggaggaacctttagacatcgcgccaagggaacccataccgcggtaagatttgtacgaacggccctgatagagttcgatttcgcccggggactcttcggtaccggccagcattgagccaaccatgacggcggctgcgcctgcggcaatcgctttcgcaatatcgccggagaaacgaataccgccgtcggcgataaccgggataccggtgccttccagcgcttcaaccgcgtcagaaacggcggtgatctgcggaacgcccacgccggtcacgatacgagtcgtacagatggagccagggccgatccctactttcaccgcgctgcagccggcttccgccagcgcacgtgcgcccgcgccggtcgccacgttgccgccgatgatttgcaggtcagggtatttcgcacgggtatcgcggatacgctgcaatacgccttcagagtggccgtgagaggagtcgatcagcagaatatctacgcccgcggcaaccagcgcatccacgcgctcttcgttaccggcgcccgcacccaccgccgcaccgacgcgcaggcgaccctgctcatctttacaggcgtttggtttacgctccgctttctggaaatctttaacggtgatcatgccgagaagatggaagctgtcatccacaaccagcgctttctcaacgcgtttttcatgcattttggcaaaaaccacttcgcggctttcgccttcgcgaacggtcaccagacgctctttcggcgtcatataaacgctcaccggctgattcaggtcggtgacgaaacgcacgtcgcgaccggtgatgatgccgaccagctcgttgtcttcggtcaccaccggatagccagcaaaaccgttgcgttcagtcagctctttcacttcgcgcagagtggtggtcggcaggacggtctgcgggtcggtaaccacgccggactcatgcttcttcacgcgcttaacttcttccgcctggcgctcgatggacatgtttttatgaataaagccgatgccgccttcctgtgccagggcaattgccagacgcgcttccgtcacggtatccattgcagcagagagcattggaatattcagacgaatggttttcgtcagctgagtgctgagatcggcggtatttggcagaacggttgaatgagcgggaacgaggaggacgtcgtcaaacgtcagggcttctttagcgatacgtagcatgggcaatatctcgaccagggtggataaatattgccgtggcattatacagagcgtaaccgattgcatctacccttttttgcaaataatacttgcgatcccctcccagcaggttactatcgactgaataacctgctgatttagaatttgatcttgctcacatgttgccatctcaatccccctcaatttacacggttagccgcctcaatcagtcggttcgactgctgctcgaacgtgaaatgggtcaggtatggatcagcggcgagatttccaatttcagccagccctcttccggccactggtacttcaccctaaaagacgataacgcccaggtgcgctgcgcgatgttccgcaacagcaaccgccgcgtgacgttccgtccgcagcacgggcagcaggtgctggtccgcgccaatatcacgctgtacgagccgcgcggcgattatcagatcatcgtggaaagcatgcagcctgcgggcgaaggtctgcttcagcagaagtatgaacagctcaagaccgcgctggcggcggaaggcttgttcgatcagcagcataaaaaaacgctcccctctcccgcgcactgcgtcggcgtcatcacctctaaaaccggtgctgcgctgcacgatattttacacgtgctcaagcgccgcgatccttccctgccggtgattatttacccgaccgccgtccagggggaagatgcgccggggcagatcgttcgcgcgattgagctggccaacgcgcgccaggagtgcgacgtgctgattgtcgggcgcggcggcggttcgctggaagatttatggagctttaacgatgagcgagtggcgcgggcgatttttgccagccctattgccatcgtcagcgccgtaggccatgagactgacgtcactatcgccgattttgtcgccgacctgcgcgcgccgacgccttccgcggcggcggaaatggtcagccgcaaccagcaggagctgctgcgccagctccagtccgggcagcagcgccttgaaatggcgatggactacttccttgccaaccgccatcgtcgctttacccaggtttttcaccgcctgcagcagcagcatcctcagctgcggctggcccgtcagcaaacggagcttgaaagattgcgtcagcgcatgcgtttcgctcttgagacgcaaataaagcgcgccgaccagcgccagcagcgcgccgcgcagcgcctgaatcaacaaaacccacagccgcgaattcaccgcgcccagagccgtattcaacagctggaataccggctggcggaaaacatccgagcgcgtcttggcgagcaacgtgaacgcttcggtaatatggtcacgcacctggaagccgtcagcccgctggcgacgctggcccgcggctatagcgtcacttccgccagcgacggcaaggtgctgaaacaaacgaaacaggtgcgcgagggagacgttctcactacccgcctgaacgatggctgggtagagagcgaagtgaagaacatcacgccggtgaagaaaacccgttcccgcaaaaaagccggataagcctgccatttcgaccgaggataactatactgctgtcatgccctttttaaacggttctatccggctaaggagcgtgatatgccagatgcttatcctcgttatgtaattccgccctacattttacgccgcattgtcgatcgcggttcccttcagcagcagcgctgcgcgcagaataccctcagccacgttcagaccctgatggcgcacgttccggggcgccctgccgcgccccacgtcaccacgccgggcctgcttgaacgcgacatttatgatgccgggcagacccaggatctaccgggtactcaggtccgttttgagggacagccctccaacggcgacgttgccgttgatgaagcctatgactatctcggcatcacccatgattttttctggaagagctaccagcgcgattcgctggataaccgcggattgaagctcaccggcagcgtccactatggtcacgaatatcaaaacgcattctggaacggccaacaaatggtgtttggcgacggggatggcgagatttttaatcgttttactatcgccattgacgtagtggcgcacgaactaagccacggcgtgacggagagcgaagccggtctcatctatttcgaacaatccggcgcgctgaacgaatcgctttccgatgttttcggttcgctggtcaaacagtatcagcgccagcagacggcagacaaagcggactggatcattggcgaggggctactcgcgaaaggcatccacggcaaaggtctgcgctcaatgtcgcagccgggtaccgcatacgatgaccctgtccttggcaaagatccgcaacccgcccatatgaaagattttgttcatacccagcaggataacggcggcgtgcatatcaactccggcattcctaatcacgccttttatctcgccgccagcgccctcggcggttttgcatgggagaaagcgggatacgcctggtacgacgcggtgtgcgatcaatctctggcaaaagacgccgatttctcagcctttgccaggctgacgattcgccacggcgagaaacgctctggcaaagaggccgcagaggcgattactcaggcctgggagcgggtcggagtggtgctatgaatcttgccgatcttagcgatgacgcggtgattgagctggcgcgcgagggtggcgttgcctggatcccggcgctcagcgggatgcgtaagatcgtcgtggcgaagctcaacgagcaacagaagcagcggatcgcgacgattctccaacagtcgctaccgctgggcaagccgccgggccagcccgactcgcctggccggggcgaccagcgtttttttcgcatccagatcgttagcgagcagcgctaccacagcctgattattctcatcccggaggatcgtgcgccagattcactggttgaactctggcgcgacggcgaaggctgcgtcagcgataaagattaaatcggcacaaactcgacgcgttttttcgaaatcagcccgtggccattctggcaaaaataatccaccgcgccgcaggcttttaacacctccagcggcttgtggcagtccgggcagcgggcttcgacaacatactctttcgcacaacgctcgcagcgggcgctattgccctgcacagcaagctgcgtatggcacacggggcaatcaaattccatggtgactcctgacgacgggtatatcgctttattttatcacggttgcacaatctgtggctgctgccagtcattatcctccagcaggttattcgcccccaggcggtccgccacctttaattttattcaccctgcatactgaatcgggactgagcaaaagcatcatagacctgcttatcggtaaacggcggaaaagtggcccgtttagcggcatcaaccagcgcggcacaataggctttatgaccttcactcgttgtcacgctattcagtttcccctcatcgctaaatctcagatgtattgtgcatttttttcccgtccagccgtagcgattggataaccgggaatcaatagactcttttatcgctctcgcctgtttgccatatttatcgtcatcgctgaagcgtccggagctacagctcccaagcgctgatgtcttatgacagtcagaaggatgaaacggcgtacagctgctggctaaaataaccaaaccgaccatcactattgtttttttcatatccctgcccccatcgtttgacacgattctcccctacgctcatttacccgtgttctactttagcgaaaagggacgccgctgctttgaatactgccgggctggtttggcgctggcacctctacgcaaagcggccccggcgtgaaatgaatggtaatgatgttattgctggaaggcttccctttgacgtatcgccatttttccattgcggccctgacttcattatcaaacattccggaaggatcggagcttaataaccgaacgtgagtcacccgcccattctcatcaacgtcaaattgcgctttaaccaggcccggtatcccttttttttcggctttcgcgggataagcaggcttaacgcgtggttcaatcggttgtgattcagcggcacaggctatgggaataagaaacagcatcaggagggttaaaaggcgtttcattcagacctcattgtcacaaaaatatttatcctccctggtttgtctcacatttataacccggcctcaagcgagtttattattctgcgcatgtacaatggcgataataaaaaagcccggcggatgcgggctttaggtttttgatgctggcagatagcttatttgcttttcttgatgtgcttaatcaagcgtttacgcttacgcatctggttcggcgtcagggtattgcgtttgttggcaaacgggttttccccttccttgaactgaatacgaatcggcgtgcccatcacttccagcgatttacggaagtagttcatcaggtagcgtttataagaatccggcagatctttaacctggttaccgtgaataaccacgatcggcgggttataaccaccggcgtgggcatatttcagcttcacgcgacggccgcgcaccagcggtggctgatggtcttcagcagccatggtcatgatgcgggtcagcatagcggtacccacgcgacgggttgcgctgtcgtacgcctcgcgcacggattcaaacagattgcctacgccgctgccgtgcagcgcggagataaagtgcacgcgggcaaagtcgataaagcccagacggaagtccagggtctctttcacctgctcttttacttcctggctcaggccgtcccatttattgacgacaatcaccagcgaacgaccgctgttgaggataaagcccagcagggagagatcctgatcggaaatcccttcgcgcgcatcaatcaccagcagcaccacgttggcgtcttcaatcgcctgcagcgttttgatcaccgagaatttttcgacgacatcggtaattttgccgcgcttgcgcacgcctgcggtatcgataaggacgtattcacgctcatcgcgctgcatcgggatgtagatgctgtcgcgagtggttcccggcatatcgtaaaccaccacacgatcttcacccaggatacggttggtgagcgttgatttacccacgttcgggcggcccacaatcgccagcttaatcggcagatcctgcgggttaaaatcatcttccggctcttcaagcgcttcgccgttctgctcggcttcgaactgcgcccagtatgctgcgtcttcgtccacttcttccggcgggttcacctcgtcaacccacggcagcagcacgtgctcgagcaggctggtgacgccgcggccatgggaagcggcgataggataaatctcgcctaaccccagcgaccaaaaatcggcaatcgcctgatcggcatcgataccgtcagttttgtttgccaccaggaaagtcggtttctcacgggagcgcagatgtttcgcaattgccgaatccgccggcatcaggcccgcacgcgcatcgaccataaacagcaccacgtccgcttcttcaatcgccagcagcgactgttccgccattcgcgtttctacgccatcttcggtaccgtcgatcccgccggtatcgatacagataaattcgcggccttccacttcagcacgaccgtacttacggtcacgagtcagccccgggaaatccgcgaccaacgcatcgcgagtgcgcgttaagcggttaaagagcgtggattttccaacgttagggcgcccgacaagcgcgaccacaggtatcatgttaaatgcctcatacaaaaatcgatacaacgcccgttttcacggcgtttttaaaaaagccaaaacggcccctgtctgccaggggccgtttctcaaaaatagactaccgctgttgttaacgcgtaatcgcgtacagcgtgccgtctttcgcctgaatcagcagtttgccgtcagcaacaaccggatcggtcaggaagcctgagctgtccaccttctgctgagccacaaagtgaccatcttcagggttgacccagtgcatatagccttcgctatcgccaacaaccagattgccattatacagcacaggcgccgtcagcaggcggtgcagcagatcgctttgcgtccacagcgtcacgccgccgtcggtggtgagcgccagcagacggtcattctggtcaaccaggtaaatacggttgccgtcgacaatgaaatcgttcactgaacccagctcgcgtttccacataatctggccgctgcgcagatccagcgccgtcaggttgccgttgtaggccagcgcgtaaatcacgccgttcacgataaccggcgtcgtgtcgacgtcgttaagacggtcgatttcggtcggaccggtcgcggtagagatacgctgctgccaaatcatctggccctgctgcatcagcaccgcgctgacgcgaccgttgtcgccgcctacaatagctgcgccgtaggcggtagccggagcggattcgccgcgcagggagagcgctggcatatcaaggttaacggtccatttcaccgcgccatcggcttcgttcagcgcctgaagctgaccgttagtggtatgaatcagcaccatgccgtcgctgacgaccggacgagaaatcgcttcacccgccacgctcgcttcccacgcgacggtgccgtcgctggtgttcagcgcataaactttcgctttttcgctaccgatataaacgtggccgccggagacggtcacgccgccggagagcagcgcaggcgcgcgggagaaccagccgtctttctctgccagattaaccgaccacacctctttgccgtcgcctgaattaagggctttaacggtacctttacgatctgcggcatacacgacgccatcagcaaaagccgggtgcaggttagagtagaattcgccaataccgccgccaacggaggtgctccaggaggtggacggcgtaaactggttttccaccgtcggcagtggcgacattttcaccacatcttcttcgctgttaaacagcgaacagccgctcaataaggtaacggaaagcagccctggcagaagtaatttacgcaattgcatcgagtccctctcagatggacaaattatttattttcatacgcatcatttcgctgagcgccggtgaggcatcgcttttcgcgcccgcttcccatgctgctttcgccccttgcttatcgcctttgctcagcaggatctcgccgcgcaggtcagcgacaattgcggtccagccttcgcctttcacggcatccagggttttcagcgcggcatcaggctgcttaagctgcagctggacgcgagcaagacgcatattgataaccgatttcaggttatcatcagaagcggccgtaagcccctgctgaagctgcttttcagcgttctgcaggtcgtttttatcgacaaactgctgcgccagctcaagagaagcaaacgcaccataggtgtttttgctgtcggcggcaaatttctgcgcagcgttcagcgcttctggtttatccgatttgagggcggaaatcgcattttcataagccagagacgagcctctggcggtatccaactgatgggaggtccagtagcgccagccaaccagcgcgccaacgcccaaaatcaccccaacggccagcgccttgccattttcagcaaagaaacgcttcagcgcgtcgacctgatcgttttcgttattgtaaagttccacgcagtccttctcctgactaatgattcccgggagattaacccagaagtgtgcgcaaatgcgcggcaacgctatcctgcgttacggtagtttgctctcctgagcgtaaatctttcactaccacgtttccgtcagcgatttctgattcgcccagcaccagcgcaacgcgagcgccccatttatcagcgcgcgcaaactgcttcttaaagttgccgccgccgtggttggtcatcagcttaacgccgggtaacgcatcgcgtacctgttcagccagacgcattgctgcggactgggtgtcagttccggaggctaccaggtatatatcgacaacaggatcggctttaaattccggattcactgcctgaaccagtaaaacaagacgttccagccccatcgcaaagccgacgccaggggttgcgcgaccgccaagctgctcaaccagaccatcgtaacggccgccggcgcagacggtgccctgggaaccgaggctggttgtgacccactcaaacacggtgcggttgtaatagtcgagaccgcgcaccagacgctgattcacggtatagcggataccggcatcatccagcagcgcgcaaagtcccgcaaaatgcgctctggactcttcatcaagatagtcgcccagcgtcggggcgtcgttcagcagcgcctggacgtccgggtttttagaatccagcacgcgcagcgggttagtgtacatgcggcgtttgcagtcttcgtccagcttatctttatactgctcaagataggccaccagcgcgtcgcgatagttagcgcgagcctccagcgaaccgatagagttcagctccagcgcaacgtggctggaaatgcccagctcgcgccaccagcgggcggtcagcataatcagctcggcatcaatatccggcccctgcagaccgaacgcttccgcgccaatctggtggaactggcgataacgccctttttgcggacgttcgtggcggaacatcggcccgatataccacaggcgctgttcttgattgtacaggagaccatgttcgatgccggcgcgtacgcagccagcggtaccttccggacgcagagtcaggctatcgccgttacggtcctcaaaggtgtacatctctttttcaaccacgtcggtcacttcgccgatagcgcgtttgaataacggggtctgctctacaatcggcaaacggatttcgctgtaaccgtagctaccaagcacctgcttcagtgagccttcaatgcgctgccagagagcggtttcgcccggcagataatcgttcatgccacggatggcttgaatgttctttgccacgtttattctctttatatatacaaaaatgaaccccggcgcctcgcgcccgcaggttcaatcatacacgggaagcgtatcgcttcccaacacgttatttcgcttcaacctgctgaatatcgatgcgacgcgcctcatcaagcatcgatgctttagcgcgaatacgcgcttccagctgatcgatcatatcgtcgttatccagtcggtctttacgtacgccgtcttcgtacaggccgcttttcttgttgccgccggtcacgccgagggtggaaaccagcgcctcgccgggaccgtttaccacgcagccaatgatcgaaatatccatcggcgtaatgatatcttccaggcgctgctccagcgcgttaacggtaccgataacgtcaaactcctgacgtgaacatgtcgggcaggcaatgaagttgattccgcgagagcgaatgcgcagcgacttgagaatatcgaagcccactttgatctcttcaaccggatccgccgccagggagacgcgcagcgtatcgccgatcccttcagacagcagcaggccgaggccgatcgcggacttcaccgcgccgctgcgcgccccgcccgcttcggtgatcccgaggtgcagaggctgatcgatctgtttcgccagcaggcggtaggattcaaccgccaggaacacatcggaagctttcacgctgactttaaaccgatcgaagttgagacgatcgaggtgatcgacatggcgcattgccgattccagcagcgcctgcggggtgggttcaccgtatttttcctggagatctttttccagagagccggcgttcaccccgatgcggatagggatatttttatcgcgagcgcagtccaccaccatgcggatacgctcttcgttgccgatattgcccgggttaatgcgcaggcaatcaacgccgtattccgctaccttcagggcaatgcggtaatcgaagtggatatcggcaaccagcggtacgctaacctgctgtttgataagcttgaacgcttccgccgcgtccatcgtcggcaccgaaacgcgcacgatatccgcgccaacgcgctcaagggctttaatttgatttaccgtcgccgccacatcggtggtgcgcgtgtttgtcatcgactgtacggcgatgggagcgccatcgccaatcggcacattcccaacgtaaattcgctttgattttctacgttgaatcggagcctggttatgcatgaaaaatctcccgcgttacccgtctattactgcgccggtgattgttcggcattgagggtcagacgtgcaacctggttagttctgataaaacgactcaaatcgactggtttacccagatactgtatctgtaccgccgccggggcaccgattttcagcttataaggcgcctgaccgctcagattgaggttaccgcctttacgctgtaaaccgctgaacagctttttaccggtcgcatcgctcacttccagccagcagtcggcggtaaaattcagcaccagatcctgggcggaggccgccgcagcggtcacgtttgcctggtcggtcggtaacggcgaagttgccggcgctgccgccgtatcgacgttggcctgagaaggcgcgacaacggcgttattctcggccagagccggggccggggccgacgccgctggcgccggagacgtttctacaggcgcgctgttggcggcggtatccggtgcagaattcgccgattgattatccagagggatgctttggctgttgctatcgcccgcattcagttcggcggaggattgatcggccatcgtggagatctcgtcctgctgcgctttgtggtcctgccaccaccaggcgccgctgaggccaatcaccacgaacagcaccagccaggtaaagctcattagccagccgtcgcgctttttacggcgtttacccagcgagaagctctgcatgggggcaactttcgccgcccggatcggagcctgcttggccatcatcggcagcagctcttcttcaggaatgtgcacaaggcgggcataagagcggatatagccgcgcaggaaggttgaagcaagatcggcgggtgccttatcgtcttcaatatcacgaaccgtggaaaccttcaggcataagcgttcagccaccgcctgctggctgagcccgagttgttcgcgggcattacgcagacgcgcgcccgtggtgtttgcttcttgatggtcttgagtggcttcagtattcattcgctacaactactggtacgtgaaatttaaaattcagcgccggtgaccccgcgccgcgagacatctgctcaacgtcagacaaacagtataagtccgtatgacctggtatcacagagacttatcaatattgaatgctaagcggttgttgtaccgctacatactgcctcaaagtcgacaaaaacgcaccgtaattattaaccacaacagcgtatttcgcccggcgattccacataaatatgcagcgcaccgccagggctgtgcgctgcatcattgattatcagaccgccttcacgtcgatggcttcgccctgcatacgtttacgcagcgtacgcttggtacggtcgataacgtcgccggccagctgaccgcatgcggcatcaatatcgtcgccgcgggttttacgcacgatcgtggtgaaaccatactccattaacaccttggagaaacggtcgatacggctgttggagctacggccatacggcgcgcccgggaaggggttccatgggatcaggttgattttgcacggcgtatctttcagcagcgcggccagctcgtgcgcatgctcggtgccgtcgttgacgtgatccagcatgacgtattcgatagtgacgcgtccctggttggcgttggacttcgaaatatagccacgcaccgagttcaggaaggtctcaatattgtatttcttgttgatcggcacgatttcatcacgaatggtatcgttcggcgcgtgcagagagatggccagcgcgacgtcaatcatatcgccaagcttatcgagcgccggcaccacgccggaagtggagagcgtgacgcgacgtttagagagaccaaaaccgaagtcatcgagcatgatctccatggccggcaccacgttagtcaggttcagcagcggctcgcccatccccatcatcaccacgttggtaatcggacgtacgccggtggtcttcaccgcgccgacgattttcgccgcgcgccagacctggccgataatttccgaaacccgcaggttgcggttaaagccctgctgggccgtagagcagaatttacactccagcgcgcagcccacctgggaagaaacgcacagggtggcgcgatcgtcttccgggatatacacggtttcgacgcgctgatcgccaacggcaatcgcccacttaatggtaccgtcgctggagcgctgctcttcaacgacttccggggcgcgaatctccgcgacttcctttaatttgccgcgcagaactttgttgatatcggtcatctcgtcaaagttatcgcagcagtagtgatacatccatttcatcacctgatcggcgcggaaaggcttttcgcccatgtttttgaaaaactcgcgcagctgctgacgattcaaatccagcaggttgattttggcatctttgttcggcaccgtcagagcggcgctatcaggtgtgactatttgttcagacataattgattccggcctcgttattacacgttatggcccctggagggttgaaaaaagaaacgccccgggagcgactgctcatccggggcgctgtattctacaaattctggtccatcaataccacgtttgcacgcagcaatgatgaaaaaatctgtaactgcctggcagatcctctaaggattttcgattgtcgcaaggcggtaagcaagtgaagccccgggagcatagataagcgaccggggtgaacgcgcgcagccaacacagcgatagtcgaaaagacgacgaggatgggtatctccaaagtattttacgtcacggcgaggcggcgaattcgcaaatcccgggagcatagataactatgtgaccggggtgcgcgaatgaagccaacaaagcggtggcgtgaaagacgcgggagattagcgggtgcgcgggcaaacctcgccttcagcaaagaaaaacgcgatctcgcgcgcagcggattcaacggaatcggaaccgtgggtgccgttctcggtgaagctgtcagcgtagtctgcgcgcagggtacccgccagcgcgttcgccgggttggttgcgccaagcaggtcacgatgacgctgaaccgcattttcgccttccagcacggaaaccacgatcgggccggaagtcatgaattcaaccagaccgtcaaagaacgggcgaccttcgtgctcagcatagaagccgcgagcctgctcaacggtcagatgcagcattttggtgccaacaattttgaaccctgcagcttcaaagcgagaaaagatgccgccaataacgttttttgccaccgcgtttggtttgatgatggaaaaagtacgttcaatagccatgataacctctttatatatgttgttctgttttgcagatgagcagatgagaccgataaatacggcgcgaattataatcatcatctaaggcgattgcctatgtgtttaggtaacatttttttaaaaaaaagcgaccttaaacaacaaatcccgccaattaaggcacgttacgtttattgcacggtgaagttcacggcaacaatttgccccgcctcgtccatcactaccagctgataacggtcagggcgatcgatgttaagggtcgcgctggcgccttccgccggcagaggctcaccgttaagaaaccaccagcggcgcccctccccgccggtcgtttgcagcggcagcatcaccttttgctcgccgggcagccgtttaaccaccgcgccttcacgaagaccggagagcaccagcggagcggcatccgcggtttgcaccggcggacacgccgccgaaaccgcaggcagcctgacgcgacgccgttcgcctgcgggtagccagggttcaagcggcaggggccagacgtcgaggcttttctctaccgcgccggggcaatctgccgccacccgcagccctttctcattcagccataccgggaagcgaatcccgcggataccttcctggccgggcagcaggagggtcggcggctggctctcatcgagcaaccaggtggccagccgtcggcggcagttcgcgtcgcccgcgggtaaattctgcccgccgggccagcaaaccgtcccggcgctgaccgacgacgggcgagggtcggccggcaatccgccgcggctcatcgccgggcgcgccagcagcatattattcacctggttcagcagcggcaccgcgctggcgaagccaaactgcccgacgaccggcgtgccgtcgggtcgcccggtccagatacctatcagatagcgggcgttcacgccgatcgcccaggcatcgcggtagccgtagctggttccggttttccacgccagcggcaccacctgcaccagcgacgcatcgggcaccggctgcgcttcgccggccagtatgcgccgcacgatccacgcggcgcccggcgacagcagcggcctctcaaccagcggtgagtctggcgtgatgcgcaattgtcccgccttaccatggcgggcgaacgcgctgtacgccgccacgatatccgccagacgcgcgccgcctccgccgaggatcagcgacagattcggctccgcgccggcgggcagcatcagcggcaatccggcattgcgtagcctggcggcaaaacgcttcggcccgtaggcctccagcacctgcactgccggaaggttcagcgagcgaaccagcgcgtcgctggcgctcaccggcccgtgaaaaccgctgtcaaaattccccggccggtagtcgctaaaccgtcgcggcacatcctgtaacaacgaagccggatggatcagcccctcatccagcgccataccataaacaaacggcttcagaaccgagcccggggagcggatcgccgagaccatatcaatatgaccaaagcggctatcatcgttgatatccaccgaccctacccaaccgcgcaccttcatattggtatggtcgaccacgatcatcgctaaagagctgcgcggcggcaggcgcgatttccagttcagcgccaggtcttccagctgccgctgcagtccggcatccagcgtcgttaccaccttctctgcgcggctgctcgccagcgcgcggcgggcaaaaagcggcgccagctgcggcatctgccgcggaaagagccagacgggctcttcgatagcttctcgtaccggctgcgccggccacacgccctgattttccatccgcagcagcaccttatcgcgcgccgcctgcgctcgctccggccagcgatccggacgcagcctgctcggcgcctgcggcagtaccgccagcagcgccgcttcgccatagctgagctgcgcgggcggtttaccgagataggcccagctggctgcgccgatcccctgcagcgtaccgccgaacggcgcccggttgaggtagagcgtgaggatctcgctttttgacagatgccactccagctgcagcgcgcgccatagctgacgcagcttgccgccaaaggttcggggatgcggatcgagcaggcgcgccacctgcatggtcagggtgctgcccccagagatcacccgcccggaagtgagatcctgccaggcagcgcgaacgatcgagaacggattaacgccggggtgatcccagaaccagcgatcttcatactggatcagcgcctgtaaatagcgcggcgaaacgtcagccagggtcaccggatagcgccaaacgccctgcgcgtcggcgaaacgccacagcggcgtcccgtcttccgccaccaccactcgggcaggcgtcacctcgcgcagcggcagcggccacaggcgatcggcggccagcagcagcagccacagcaaaaaaataaacgccgccagccagcgccagcggcgtttaatgcgcttcagtgcccgcatttagggtgcaacggtgagcggtccgctggccgcgccggttgcccgccactgcggcacgtacattgactcgacctgcggctgcggtacctgataggtgcccggcgtcaccgcgcgcgccagataaaccagcgtcaccggctggccttcattgatagccaccgcggcgacgaagcgatcgtcgcgaaactcaatgtgctgaatatcggcctgctgcatctggttaagcagattctgcaccacctcgccgttctcctgcaggctggcgctgctgttggccagattctggttttccagctccagccccgccgggagtaaatccaccaccagcgcgtccgggacgttacgcttagccgtcacttccagcttcaccagcaccagttcgccgctgcgcagcgaagagagcgatttctgctggccctgggtatcgaaaatttgccgttcaatgccgagtacgttgccccccggctgcggcgcgttctgcggatatccgctgctgtcgagacggagccacagcggctgctggccggtattggtcacctgcaaggccgccagctggtcgccggtcaggttgcgggtttgcgctttctcgccggagagcggttcggcctgcacggaggtttgcgcctgccagctgccggggagatcctgcagcgtacgcccggccaggaacagggcgttactctcctgcgtcgagagccagcgctggccgtaggcttcgtccgccagatggctgagcagcgtattttgcgcttccggcagcagtttgttctcctccagcagcgccagcttcagcgcatcgtcgcgcagctcgctgccgtaatcgccgagccagcgattcgcgtcctgccgcggcgtcgtcagcgccagcttcagggcttcgccgccgcgcggcgcatcgcccatcaatttcagggccacgcccagctgcagcagcggcagaccggaacgcgcctggtcgtgacggctccagatttcgcgcagcgcgccgagcggcgctttctgctgccgggccagtaccagcgcggcgtaggcctgagcggcaaagcggctggcctgggcatcatcgctatagcggacggtcatcagccccggctcctgtaaataacgcagcaggcgctggttgccgttattgacggcgttcgttggtacgctgtagccctgctcgcccgcccggacgaggaagtccatcgcgtaggcgctcaaccagtactcctccggcccttctttatcccacagggcgaaaccgccatcatcgcgctgcatctgcagcagacgagaaatgccgatatccaccgccgcgcgtcgcttttcatcgctatcgccgccgatccccagggctttaagctgggcggcgttggtatagagcgacgggaacagcccgctggtggtctgctccaggcagccgtaaggataggctttcaggtcgcgtatatagcgcgccaggttcagcggcggcttaccgctgaacaccagctgcccctgcaacgtcgcgggcgagaagccctcgctttgcgccgccggagcctgccagctttcacccggctggaggacagcgccggaattcacggtttgcgccgggaaagccggacgcacgcccagctgccactgcttctgcatcggcgcgaaggtttcacccggcaggttcaggccgctgatggtggcattcacctgaccatcgccaaagccttgctgcgcgcgaaccggcacaaacagcgtgctgcgcgcgccgggagccagatgcaccggcggtatttctcccccttcaagctgcagcagaccgctggcggccagcgcaacgttgagggtctgcggcttatcggtcagattgctgagatccagcgccaggcgagtggtatctccgctggcgaggaagcgcggcatattcagctcggcaataaccggcgccgccacgatcgtttttccttcgctgctgccaaaatcctcagcggtccacgcctgggccataacccgcagttcgccgttaaagtcgccaatcggcaaagtcaccgtcccttcgcctttctcatccagcaccaccggctgcgcctgctgagcgataatcgtcacgtgattaaccggcggtttgccgccgcgtttgagttcatcaccgtcgccgccgaagcgcaggctggcgagtctcccctgcccttcgatcacctgaccatagatatcgtaaatatcggcgccgtagcgtttctggccaaagaaagcgttccacggatctggcgttgcatagtcggtgatattaagtacgccgctatcgacggcggagagcagcacgttaacctgtttcggcgtctcgccttctttgacgctggccttaacgttgaccttcagcggctggttggggcgcattttatccggcgcttccagcgtcaggttcagacggcgattttcatcgccaagcggcagatgcagcagacccaccgcccgttttggcgtcgcggactgggatttatcccccggacgaatcaccagggtgctgaggtagaggtcgtgacgattccacgctttatccaccgggatcgatagctccatcccttccgccgggacgtcaatctcctgccaccacagcggcccttcgcttgattccaccagcgcgtagcctttaccggctgccggagcggcgatatgcagcttgatcgtatcgcccggtttataggccggtttgtccagcttcatggtgacgcggtccggacgcgccgccccctggccatcgctgttatcctgccagctgtatccggcccagaagcgcacgctgctgaccgcatcatccggccctttaacttccaggcgataagaaccccactcgaccgggaagctcactttcgccgtttgtccggctgaaatatccagcgactcctcgccttcctgaagatctttttgatcgaactgcgactgccagccttcgctctcggaccagttccagtagtagtcgcggcgttcgcgaatcaaccgaacctgcagcccggagaccgctttcttctcacctttggcgtcggcatacacaatctcaaacgcggcggtgccgttttcatccaccaccggctgcttgatagtgctgtcggtgcgatagtcgtaaacctctttcagggcaaattccggtcggatacccggcagcgtttcggccggccagatcggctgcctgacgatgcgcgtgaccggtctgccgccggactccagcaggctggcctgcaggatcacctgcagcggcgagcggctctcctgccactggctggcggcggtgacttccgcatgtccgcgatcgtccagggtggtctgtacttcatccaggctgcgggaaaggttctcttcggcaatgtcgccaaactggaagcccggcagcgcaggcaccgcatcgcgcagcggacgcaggaacagtttaccctgcagcgggttgccgctggccggcgcgccgtacagatacgccccgctcacggcaaagctgacatccgcagccggcgaaaccggggcattttgcggcgtgagattcagcgccatgcgctcaggcataaaatcttcaacgtgaaaatcccactcgcgcggctggttgtcgccggtgctggcgcgaatgtgccacatcccggtcgccgcgccgctatcgagcggataagtcaactgatacaggccgttaaccggtttgctgaccgtcgaacgaataacctggccatccggctgcacgacttccagcttcaccggctgctcggggagcggtttaccgtcgctatcgcgcagtagcgcgttgagaataaccgtttcgcccggacgatagagatcccgtgggccaaacataaatagctgcttgctgaagcccggcgcaccggcgatggaaaattcagccaggtccagcgccggaagtttgagatccagcagagtggtttgcccgtccttacgcgccagcagcagcgccgcttctttgtccgtttgcagcgtcacgtgcccctgagcgtcgctcttcgcctgcgccagggtttgccctttggcgttcagcagctgcacatcgataccggactgcgccgcgccgttttccaggctctgggtaaagacatccagccggttgtggtagcggtgcgcggatacgccgatatcgctgagggtgaacagcgtcgcggcgttgctatagctgtagcggcccgcctggttcatcaccgcgatatagacgcccggctcctgcaacggcttgatatccgccagcggcagcagcagtttttcgcgcgtattgcgcgccgggttaaggtcaaaacggccggtgtagaccagatcggccatcttcagcagctcgtccgactcccagttgctcagggaattgcggtattcccattggctgacgaaggcggagagcgattcaggtttgatgcggaaaaaattgacgtcgatgttatcgacattcagcgccatcaccggcagtccggccaccactttccccggcagcagcgagccgcggctggcaaagccgatgctcggggcgatatcgcgggtggtaatggttttttcaacgctgctgtctaaggtcgctttattcagcgcggtcagggtggggtcgagcgaaacgatcagctcgcgttttggctcaagatggcgtagacgcagctctttaaggttgggcgccagctcccatgccccatcgactttgccgctttttttgtcgaccagatgcacgctgcgggagaaatcctgatccggctgcagaggaatagagaaggtcagcaccagcgtcgccgcgccgtcgagctgaacttcagaagcatccagcagcgttaacgctttgcctttgcttttttcagccagcgccgccagctgggcgctgtccggcttcgcgggagcgctatctgccgccgcggatggcgccgacgcgaccgcctgcggtttgccgctgtcgtcacaggcggtcaacgatagcgcggtaagtagcgccagagatagcgccgccaaacgaaatggtttcatccttctaacccctcggcccgcaggccagataaattcagtgaacacattattatgcgttaacggcagaattaccaatagcgcgctagcaagcaatattggtagggaccacggatagcaggagtggattaatttaacggatataccacgctacgatttttcttatatcaacttttaatatcctcagctatcgatactttttattctgaaatcccattctctccgcccatataaattgacaaggcgcgcgttttctatttattgttcgggatatcattgcctttaaaatataaattattacgccggcgatgatattgactgtacgttccagcgtttaccagatagcacaacatcaacccatctcatataaatatatatgggattaataatatggaagttatttatgtctcagatggtcgcactgtcgattattattttaattctttatatcggcgacgttgtttcaacccgcacaaaagcctggattccttccgtatttgtctgtgcggtcctgtttttaatcgggtactggacatttttcccggcagatattatcagccgggccggaatcggcacgccggttgccataatgctgatgtatctgttaatcaccaatatgggcaccctgctgtcgctaaaagagctggcgcagcagtggaagaccgtggtcatctccctcgccggcattgccgggatcgcggcggcggtctttgcggtgagcctggcgctgttcgaccgcaacaccgcgctggtcaccattcctccgctggtcggcggtatcgtctcatcgctgattatgtcgcagggcgcgagcagcgccggcctggtcgacctgtcggtttttgccattttgatttacgtgatgcaggggtttgccggatatccgctcaccgccatcatgctgcagcgcgaaggtaaaacgctgcttgcccgctaccgcagcggcgagcaccgacccgataacatcgccgatgagcacgcgatgctcaccgttggtgaggagaaaatgccgcgcctgttcagtaaaatccccgttagctacaacagcaactactttaaattcctgcggctggcgctggtcggctgtctggcctggcttgtcgccgacctcgcgaagccgatagtgaatatcagccccttcgtgctgtgcctgttttttggcgtagtgtttacctcgttaggctttcttgaaaaacatatgctgcataaggcgaacggctttggcttcgccattatggcattgatgctatttatctttgataccttaaacaaagccacgccggagatgctgctgcgcctgcttttcccgatggtggtgttaatcgccacggcggcgatcgggatgtttgtggtctcctggctggtcgggaaactgcttggcgtcagcggcccgatggctttcgccatctcattgaccgcgctgtacggtttccccgccgactatattattaccaacgaggccattaacgccctcacccacgatgaaaaagagcgccagatgctgacccaccatatgctgggcccgatgctggtcggcggattcgtctccgtcaccatggtttcggtggtgttagccggaattctggtcggctatctgacccccgctgtcggctgagcgcgttgaatttttagcaaatgatggagccattgatgattaaccctgacatcaccgcgattatcgccagagaagaacaggcgatgatcgcttttcgtcgcgacctgcacgcccatccggaacttccttgggaggagaagcgcaccacggatcgcgtcgccgccggactggaggccatcggtatcccttaccgccggacgcatcccaccggaatcatcgccgacatcgccggcggccagccgggtaaaaccgtggctctgcgcgccgatatggatgcgttaccggtggtggagctgaacgacccgctcgactataaatcacaaactcccgggaaaatgcacgcctgcggccatgacgcccataccgccatgctgctgaccgccgcccgtgcgttatatgacgtccgcgagcagctggcgggcaacgtccggctgatctttcagcctgcggaagagattgccgagggggcgaaggcgatgattcagcagggggctatcgataacgtggataacgttttcgggatgcatatctggtccggcacgccgtccggcaaaatctcctgcaacgtcggttcctcctttgcctcagccgatttgctgaaagtgaccttccgcggccgcggcggccacggttcgatgccggaggcctgcgtcgatgcggcggtggtcgcttccgctttcgtgatgaatctgcaggctattgtggcgcgagaaacctccccgctggagtccgcggtagtcaccatcggcaaaatggatgtcggcacgcgctttaacgtcattgccgaaaacgccgttcttgaaggtaccgtgcgctgcttcagcctggaagcgcgccagcgcctggaaacggccattacccgctatgccgagcataccgccgcggtatatggggcgaccgctcaggttgactactgctacggtacgctaccggtgatcaacgaagagcgcagcgcgctgctggcgcagtcggttatccgcgacgcgttcggcgatggcgtccttttcaatgaaaaaccgaccaccggcggagaagattttagtttttatatgcaaaatatccccggcgcctttgcgctgctcggctcgggcaataaagagaaaggcagcgactacgcgcaccatcacggctgctttaatatcgacgagcaggtgatgaaaagcggcgctgaactgtacgcgcagtacgcctggcgctacctgcagcaaaacgcgttttaagccaatcctcccccgacgccgctcgggggaatatcacattcccgccgcctctccttgaaaatgccttgtcgatatcgcaaaaaacaacaacaatcactctattgttgatgacacggaggcactcatgtctacctcgttttttgtcgctgccgactggctggcagagcatattgatgacccggaaatccagattatcgacgcgcggatggcccctccgggacaagaagagcgcgatcttaacgctgagtatcaggcaggccatattcccggcgccgtctttttcgatatcgaagccctctctgaccacaccagcccgctgccgcacatgatgccgcgcgcggaggcgtttgccgtcgccatgcgcgaacttggcgtcagcagcgataagcatctggtggtatacgatgaaggcaatctcttctccgcgccgcgcgcctggtggatgctgcgcacgttcggcgttgaaaaggtgtcgattgtcgccggtgggctggagggctggcgccgcgatgggctaccgctggagcagggcctccccgaactgccggaaggtgattttgacggccgcgtcgatccgctggcgatcaagcgcttgacggatgtgctgctggtcagccacgaaggatcggcgcagatcgtcgatgcgcgccctgcaggacgctttaatggccaggtggcagagccgcgaccgggactgcgcagcgggcatattcccggcgcgctaaacgtaccgtggacggaactggtgattaacggcgaactcaaaaccaccgatgaactcaacgagatcttcgcgcgtcagggcgtcgattttgaacggccgattattgccagctgcggctccggcgtaacggcggcggtcgtcgtgctggcgctcaccaccctcggcgttaacggcgttagcctgtacgacggctcatggagcgaatggggggcgcggacggatttgccgattgaaccggcgcagtaggcagtaaagagaacaacgggggcctgagcccccgttgagttaaataatccgattgtgcttaaagtcgcgcaggaagctgccccagcgcttttcataaaacggcgtgatgtgggcgatcataaagtggctaatccccttttccccctccaccacctgacagatatcaatcggctcgtcgccgggaagcgtatcggtcgccacgctgccggtcgcctgaataacctcctcaatatcgccttccgcttcaataccaatcagcaggttggctggcgcatcggcgctgtctttgatagagcataaaaacgcgcgcttcaccgttttcagggtcttaaacagcgtggtcagcgagtccaccatctgcgcgggcggctcggcaacctcagacagcagcagcgactctccgccttcaagcacggtctgggtgctgagcgggctgccctcttcccccagcagatggctaatctcacgcggcgcaaactctttgccggtggcgagtttggcattgagatagagcgtttcgccgagggtcatggcgaacagcgtgcgcaccggcatcaccacaaaagactgttcgtcctcaacggcctgctgcagcgcttccagcgaggtgaaaaaaggaatgaccgatgtgccatcatctttttcccagtgctgcagatccagcacgctgtcttcaacgacctgctcgccctgagcggcggctccgggtacccacacggtagcttccagcagcgtacggaaaaacgccggacgatggcctggctcggtagccgccttctccagcagggtttctagctcatttttagtttcggacatagtagttccacaacgaaaatcccctcaccccggctctctccacgaaggaagcgggagaaagccgaacgtgacctccccctgaaacatcagggggagggtcaggggaaagggttattccgcggtcagcaaattagcaatagtgcgcacgccgaggccggtcgcgcccgccgaccactgctcaaccgcagatttgcggtaggtcgccgagcagtcgatatgcagccagccttcatgataattctccacgaagtgggacagaaagcccgccgcggtgctggcgccggccggataggccgcgctgccggtattgttcagttcagcaaagttggacggcagctggccgcggtggaactcagccagcggcaggcgccagaaagcttcgttttcagcctgcgcgctcgccagcaggcgattcgccagcgcatcatcaaagctgaacagcgcgtgataatcattgccaagcgcggttttcgccgcgccggtcagcgtggcggcatcgatgatcagcgccggcttttgcgccgaagcatcgatcaggccgtccgccagcaccaggcgaccttccgcatcggtgttcatgatttccacggttttgccgttgcgatagtgaataatatcgcccagtttgaaggcgttaccgctaatcaggttatcggcgcagcacagatacagcttcacgcgcttgttcaggccgcgcgtgatggcgaacgccagcgcgccggttaccgtcgccgcgccgcccatatcggacttcatcgagtccataaacgcgctctgcttgatgctgtatccgccggagtcaaaggtgatgcctttaccgaccaggcaggcgtacaccggggcttctttgtcgccggttgggttatagtccagcgccagcaggaccggcggacgctcggagccgcggccgacggtgtggaggcccaggtagttctgctcgcgcagatcttcgcccttggtgatgcgataagagacgttatcgcaggccacgctgcacagcaggtctaccgcacgctgcgccagctgttccggccccagctcttccgccggggcgttgatggtgtcgcggacccagtcaataatggtcaggcggttatccagttcgcttttctgcgcatcgtcgagggccggccactccactttgcggctgcctttcgggcctttatagccggcccagaatgcccatgcgcgatcggtatcccagccctcgccgtcaagcgcgacatgtttgatgcccatgccgtcaatttttcgcgccgcgcgctgaatcaaaccgaggtcgtctttgccgttcagatgcagggcgatgccgtcgttattaatgctgtaagatgctttttctccccagcgcgcatcggctggctgagcggtaagcgtaattttcatagcttcggtcattatcattatccttcttagcaaacgggccgccgtatggcagcccgtaaagttctttcgctcgttgtttcatccggcttaaaaccaccgggtaaatcatgacgcgaaaattattctgcttcgtctaaccagactagcagaatcgcctcaagaattttttcattggatgcgttcggatcgtcatcaaactcttccagatcgcaaatccactgatgcagatcggtgaagcgaacggttttcgggtcgagatccgggaaagcgtcgtacagcgcttcgccgatttcacgactatcggtccatttcagtcccatattaatgctcgcgtgcgtggttgatggtgtaacgcggaatttcgatgaccaaatcttcgtcagtcacccgcgcctggcagctcagacggctgtcgggctcaagcccccaggccttatccagcatgtcgtcttcatcttcggtactttccgccagcgagtcaaagccttcacgcacgatgcagtggcaggtggtgcaggcacaggatttttcgcaggcgtgttctatctcaataccgctacgcagcgctgcatcaagaatggtctcaccggtctcagcttccacaactacgccatccggacacaggtcctggtggggcagaaaaacaatttttggcattttaaacctcgtccacggattggcctttcagcgcgatacggaccgattgatccatacgacgtgcggcaaattcctgggtttgtgtgtcgatatttttaatcgcttctttgattgcatcggcatcatcgcctgccgctgcggcgcgcacttgctccgcggcgtcatcgatagcctgacgctctgcggcgcttaacagcgcggcgtcggcggccagcgcgctgaccagactttccagtacgcgcgcggcttcaactttttgctcggccagcatacgcgcctggacatcctgttcggcgtagctcatcgaatctttaatcatgctggcgatctcgccatcggtcagaccgtaggacggtttcacctggatagaggcctcaatgccggtcgatttctccatcgccgtcacgctcagcaggccatcggcatccacctggaaggtcacgcgaatatgcgccccgcccgccggtaatgccggaatgccgcgcagcgcaaagcgcgccagggagcggcagtcctgcaccagctcgcgctcgccctgcataacgtggatagacatcgccgtctgaccatctttgaaggtagtgaactcctgggcgcgcgccaccggaatggtggtgttacgcgggataaccttttccaccaggccacccatggtttccagccccagagagagcggaatgacatcaagcagcagcagttcgctgtccggcttattgcctaccaggatatccgcctgaatcgccgcgccgatggcgacgactttatccgggtcgatagaggtcagcggcgtacggccaaagaattcgccgacgcgttcgcgcaccagcggcacgcgggtcgagccgcccaccatcaccacttccagcacctcttgcgcctcaacgccggcgtctttcaacgcgcgacggcaggccagcaaggtgcgtttgaccagcggggcgatcagcgcattaaactggctacgggtcacctccccctgccagccgccgacgttcacccgcgccgtctcggcatcgctgagggcgattttcgccgcgatcgccgcgtcaagcagctcgcgctgcaggcggttatcactgcgatcgctcaggccagcctgctcgcgcagataatcggccagcagatgatcgaaatcgtcgccgccgagcgcggaatcgccgccggtggccaggacttcaaacacgccgcggctcaagcgcagcacggagatatcaaaagtaccgccgccgagatcgtaaaccgcgatgaccccttcctgaccggagtccaggccgtaggctatcgccgccgcggtcggctcgttcagcagacgcagcacgtgcaggcccgccagacgcgccgcgtctttggttccctgacgctgagcatcatcgaagtaggccggcacggtaatcaccacgccgtcgagctcgcccgccagcgcctcggtggcgcgttcggccagcgcttttagaatgtcggcagatacgcggatcggattgagcaacccccccgtagtctgaatcatcggcaggccgttttcgctggcctgcagctgataaggcagatgtggatagcgggcctcgatatcggccagagagcggcccatcatgcgtttgacggagctgatggtgttgaccggatccagagcggcgttttgtcgcgcgtcatagcccaccgtcaaacccgaagcctgatagttcaccaccgacggcagcaaatagcgcccctgatggtcgggcagagtttcggcctggccgctacgcacggtagccaccagtgaattggtggtgcccaggtcgatacccgccgccagacgtcgctggtgcggcgcggcgctcagtccgggctcactaatttgtaataaggccataattgcttccgaaaattaaaaatcgagcagtttttcttcgagttgttccgcactgcttcgcagtttatcgagaaaacgcagcttgcgcacggtatccgccgccgcctcccacgtctcgttattcagttgttcaaccatcagctgatgccgggtatcaaattgcgctttgacccgcttgataaagctttccagccgcgcttcatctttcgccttgcctatctcatcgagctcttcgcgcagttccagctgttccatcaggaacgcggtatcgcgcacggtatgctgctcgctggcgagatcgaaaccgtgaagtgaaaggagatattcggcgcgggtcagcggatgacgaagggtttgccacgcctgattaatggtggcggactgctgcaccgcggcgagctgttcagccgcgctgccgctggcgaacttatcgggatgatactggcgctgtagctcctggtaccgggcagccaggggttctaacgaaagggtatagctggccggtaacccgaagagggtaaaatagtccatagcaacctcagggttaacgagataaagcaaaccccacgcgcagcgagactacggtggggtcagggataaccgattacacgttaaagctttcgccgcagccgcactcgtctttcacgttcgggttggtgaacttaaacccttcgttaagaccttctttgacgaagtccagctgcgtgccgtcgaggaactgcaaacttttgccgtcgatcacgaccttcacgcctttgtcttcaaacacggtgtcttctgccgccggctcgtcaacaaactccagtacataagccatacccgagcagccggaagttctgactcccaggcgcagaccaaaccctttaccgcggttggccagaaaggtgttgactcgcgctgctgcactgtcgcttaaagtaatcgacataacaaacctcaactcttaattattttgcttcacgtttgcttttgtaatccgcaatcgcggctttaatcgcgtcttccgccagaatagagcagtgaattttcaccggcggcagctcaagctcgtctgcgatatcggtgtttttgatcgcctgagcttcgtccagcgatttccctttcacccactcggtcaccagggagctggaagcaatagcggaaccgcagccgtaggtcttgaaacgcgcgtcttcaatgataccttcattgttgactttaatctgcaacttcatcacgtcgccgcacgccggtgcgccaaccatgccgctgccgacgttttcgtcgctattgtcgaaggagccgacattgcgcggattctcgtaatgatcgataactttttcgctgtaagccatgatgaattctccttattggtgccgaattagtgatgtgaccattcaatgctgttcagatccacgccctgcttgaacatttcccacagcggagaaagttcgcgcagacgaccaatggagttgcgaaccagattgatggtgtagtcaatctcttcttcggtagtaaaacgacctaaagagaaacgaatagagctatgcgccagctcgtcggtcatccccagcgcgcgcagcacgtaggacggctcgaggcttgcggaagtacaggcggaaccggaagagaccgccaggtctttcagcgccataatcagcgactcgccttcaacgtagttaaagctgacgttgagaatgttcggcgcgccctgctcgagatcgccgttcaggtagacctcttccatatcttttacgccgtcccacagacggttacgcaggccgcgcaggcgggccatttcgctttccatctcttctttcgcgatacggtaagcttcacccataccgacgatctggtggacaggcagcgtcccggagcgcatgccgcgctcgtgaccgccgccgtgcatctgcgcttcgatacgaatacgcggtttacgacgcacatacagcgcgccgatgcctttcgggccatagattttgtggccggagaaggacatcagatcaactttcagctggctcaggtcgataggcagtttgcccacgctctgggtcgcgtcaacgtggtaaatgataccgcgggcgcggcacatctcgccgatggtagcgatatcctgcaccacgccgatttcgttattcacgtgcataatggaaacaaggatggtgtcatcacgcatcgcggcttccagctcttttaaatcgataatgccgttacgctgcggggcgaggtaggtcacttcaaacccttcgcgctccagctgacggcaggtgtccagcacggctttatgttcggttttgctggtgatgatgtgcttgccttttttctgataaaagttggctgcacctttaatcgccaggttgtcggattccgtcgcgccggaagtaaaaacgatttcgcgcgggtcagcgccgaccagctcggcaatctgattacgggcgatatctaccgcctcttcagcctgccagccaaaacggtgtgaacgcgaggccgggttaccaaaggtcccgtccagggtcaggaactgcatcattttctcggcaacacgcgggtccaccggcgtggttgcggagtaatcgagatagatcggtaatttcattgctctataaactccgtacatcgcttcaatgcaaggaatcaggcaaccggctggatgtacgaccgagtacacaggatgtcggaacatcctggcctgattcgaaaatcttttttatcttttttactcagctcgtttcagcttgcagccgatagctgcaagatgaaactgaacgagaactacgcgcgcagtttgacgtcgatggcgtcctgagcgcgggtgctacgctgggattcatggttgtgctgacggccagagacatcaaggatttcctggttattcaccagttcgcccagcgtgatgttattcagaaaaccggtcagtcgctcgctcagatcgcgccacagcgcgtgagtcagacacttatcgccgccctggcagccgcctttaccctgacaacgggtggcgtcaacggattcgtccactgcgctgataacttcgccaaccgcgatgctacccgcttctttacctaacagataaccgccgcctggaccacgtacgctggaaaccaggccatttttgcgcaggcgagagaacagctgttccagataggaaagcgaaattccctgacgctctgaaatatcagccaacggaaccggacccgattcagagttgagcgcaacgtcaagcatcgcggtcacggcataacgccctttagatgtcagtctcatgtcttacttaacctcaaactcgcccctgcccgggctttttattaatatgggtattgcatagcaagggcaagtctgacattcccgagtaaattggtcaactatttacttgactgttttagtcaggtatttggctttccgtgccgtttcacttcagcgcggcctggtgccctcgccccggccctctcccacaaggagagagggagcccgcagtaccgcgccgccgggcaacggcgtgcactatgacgctttatttttctgctgctgctcaattgacgccagcatgccgcgcaggatgttcagctcctggctttccgggcgggcgcgggtaaacaaacggcgcagtttgttcatcacctggcccgggtggctggcgcggataaacccggttgccagcagcgtctgctccagatgaccgtagaaacgctctaaatcatccaccagcggatacggggtttcttcatgctcgatgacaggttcattttgctcctgcgccgccagccaggccatacgcacttcataggagataacctgcaccgccatcgccaggttcagcgagctgtattccggattcgcggcaatcgccacgtggtagtgacacttctgcagctcttcgttagtcaggccgacgcgttcgcggccaaataccagcgcgatcggcgcatgctgcgcttcggcaacgcttttcaggccgcattcacgcgggtcgagcatcggccacggcagcgtacgggagcgcgcgctggtccccacgacgaggctacagcccgccagcgcttcatcaagggtatcaacgatgtgggcattgccaatgacgtcgctggccccggccgccagagcgatggcctgagaatcgggtttgaccagaggattgaccagccacaggttggttaaccccatggttttcattgcgcgggcgacggagcccatattgccggtgtgtgaggtttctaccagtacgattcgaatattttgcagcattatggttcttcggctaaagattattcgtgcatgctatcataaaacgaagacataaggagatttcactgttactatatgcgccgttttttcccgttctttaacatccagtgagagataccgatgcatccgatgctgaacatcgccgtgcgcgcagcgcgcaaggcgggtaatttaattgccaagcactacgaaacccctgactccgtagaaaccagccagaaaggcagcaatgattttgtgaccaacgtcgataaagccgccgaggcgatgattatcgaaaccattcgcaaatcttacccgcagcacaccatcatcaccgaagaaagcggtgagcacgctggtgaagatcaggatgttcaatgggttatcgatccactggatggcaccaccaacttcgtcaaacgtctgccgcacttctccgtctccatcgccgtacgcattaaaggccgtactgaagtggccgtggtttacgatccgatgcgtaacgaactgttcaccgcgacccgcggtcagggcgcgcagctgaacggctaccgcctgcgcggcagcagcgctcgcgacctggatggcacaatcatcgccaccggcttcccgttcaaagcaaaacagcacgcgacctcttacatgaacatcctcggcaacatgttcaccgaatgcgcggatttccgccgcaccggttccgcggccctggatctggcctacgttgccgctggccgggttgacggttactttgaaatcgcgctgaaaccgtgggatttcgcggcaggcgagctgatcgcccgtgaagcaggcgctatcgtctgcgactttaccggcggccataactacctgctgaccggcaacatcgttgcaggtaacccgcgcgtcgtgaaagcgatgctggccaatatgcgcgagcatctgagtgaagcgctgaagcgctgaagcgttaatttctcaccgcatgaaaagtaaaagaccaccttctgagaaggtggcttttgagaatgccccctgtaaggggggctattgtcaccttccgctgattactctagcaattccatctgctgttcatacgtttgttccgttttctcctgatgcctcacatatcgtctgataatttcttcattcactcccaccgtatcgacaaagtagcctcgcgaccaaaaatgattcccccatagcttcttcctgatatgtggaaaacggttataaagcctgatggcactgcgtccttttagatggcccatcagagttgatatcgagatctttggtggaatgatgacgaccagatgtacatgatcgggctgaacatttagctccagaacctcacaatcctttattccacagaggatatagatcgtcctgtacagctccttacccagcttatctttcaggatcctgaatcggtacttgggtgtccagactatgtggtatttgcaacgccaatatacatgtgatgaactcctgtaaagtcccatgtcggtttgtctccttttacttgtggtgagtaagcagagatattccgacatgggcattcttcaggctatagccttacaggagcaatcaccacctccctaggaggtggtttagggatgacaaccaaaaggaagccgcggcttccttttttatcgcattaaaacggcctcaggccgccgcccgatggcatcgcgctactccacatcacgatggccgccgccagtaaaatcacgccgccggccagcgccagcgttgcccaaccgatctgcttccacagcgccggcgcccgattcgcgctcagcctgaccgccagctggcggaaaccatgaaccagcagcgccagcgcgctaatcgtcagcgaggttcccgccgccatcgccatcgcggccgccatgccccagccaaatacgccgataaccttgctgaacaacagcaccataatggctcccgagcagggccgcatccccattgacagcacgatagccagccgcgcccgccagtcatcgccgctttgcagctgttccggcgccggcagatgctggtgcccgcagccgcagctggcgtgatgaacgtgatgcgcggtgaaggcgatgaatgtcggtcggcgcagcagcatccgcagctttttcagcgcccgccaacacagcaaaaggcccagcgcgccgaccagcagatagcttcccttttccagccagaagctgctcagatgcagctgtcttgccggcagccgcagcagcgtcagcaccaccaccactaaggcgatggccaccagcccctgcagcagcgaagcggccagcgtcaggccgatgctcgatttcagcttcgacggatgggttgccagccaggtggttatgaccaccttgccgtgccccggccccagcgcatgcagaacgccgtagacgaagctaaaccccagcagcgacagcccggcggaggcaggattctccgcaaccgcctgcagaagccgactcagttcgacattcagcgcgcgctgccagaccgcgctttgcagcagcacctgcggccaggcccgccatagccagaagccagctccggctgccagcagcagaaacagcgccagcggccacagctgacgccagcgcggcgaacggccggtttgagcaaaaatcactgacattgcagcgtcaccttttgcgcgaagtaattccccagttccatatcctccggcggcgcatccgctttatccagcgactgcgcgtaggacaacattttttcgttaggcttcggcgtcatcacttttgccgagcagcttgtcttcatcgccgtcggtagagtgaagtctgcgtctttgtcgtaatacatatcaacataataggtcgggtcgtaggtggaaaaggtgaaggtttgcccggccagaggctgcggcttcgccagcggcagggtaaaggtgagcaccgcctgatgaccgctgcgttcaaggccataaccagcgggccgattatcaaacttcacccgctggccgttgtgccatagctcgctgaaatagtgctggcccagcacgttcgccatcacttccgccgccagctttttccagatttcgctaccgggtttagcgttgcccgcatcatagagcagatcggcggaggtgatttcatccatcgtccagcgcattttaaagccggtgagcagcccattttccgccacggcctccgtttgcaaactgatgaaactgtgcggatgcgccgccgcagatagcgataaaaacatgaaaaacgctacgctgacgcattgtttcactctcttcatctgttcctcgcgtgaaaaattctgtgaaccccgccagcaatcctgatgtaaagacccggaaatgccctgttcaccctcaatacattaactactcttaacgaaaaccctaactggaactaaccggatgatgacagtgattgaaccaccatctgtgctttccagtccacagcgccgtagccaggtgctcctgatgttttatctgcccgggcagtccgtgacgcccgaatggctgggtaacctcacccaggttgatgaggataccgcccggcaggacattgcggagacgggacgcgagattcagcgttatcaccgcttgacccttgcttcacaagcggacggcagctatcggatggaaggcgccgcgctcgatcaacgtttatgcctgctgcacggcctgcgccgcgggctgcgcctgtgcccgcattttgtcagccaccattttaccccggcattgaaaacgcagcttaaacagcagggtatcgcacgcacgctgtatgacgacaccaatcttcaggcattggtcaaccgctgctcgcgcgccctgaaccggcagtttgactgccgcgacgtgcattttctgcgtctttatttacagtattgtttgctgcagcaccaccttggacagagccccactttcacccacgagcagcagcgctgggcgcaagccgccgccgagttttccctcgccgaggagattgtccgccactggcagcggcgggttgcggcaacgccccatgccggagaacagctgtttctggccctgctgtttatgctgttgaaaacccccgatcctatccgcgatggtcatcagcacgatcgccgtctgcatctggccatttccgggctgattcaccgctttcagaacctggcgggccgtccgtttagcgatgaacaggggctgagcgatcagctctatattcacctttcgcaggcgctacaccgcagcgttttcgctatcggtatcgataacgcgctgccggaggagattggccgtctttatccccgtttgatgcgcacaacgcaggctgcgctggcggagtttgaagccagctggcaggtacgctttagccaggaggaagtcagtttaatcgcggtgatcttcggcgcctggctgatgcaaaaaagcgatctgcaggagaaacaggtggttctgctgaccgatgataacccggaccttgagcagtcgctggagcagcagctgcgcgagttaaccctgctgccgctcaatataaagtatttgagcgtgagcacctttcagaaagagggcgcgccgaaggaagtgacgctgatcgtcactccctatgccacggcgctgccgctgttttcgccgccgctgtttcacgccgaagagacgttcagcgatcatcagcagcagcagatttgcaaaatgctggaggcctaagccaccgcttttggccgcaccaccagcgccggtaaggccaccagcgccatcacccagaaaacgccctggtgcagatgctggtagaggaaaccggcaaagaccgtcatcaccgcaatgctgccgcccatcgcgacggcggagtagaccgcctgcaggcggatcacttcgctgccctgacgcgccgcaatgtagcgcatcgccgccagatggcacaccgtgaaagtgccgcagtggaggatctgcgcgacgataagccagggtagcgccgtcgtccagcccatcaacgaccagcgaatcagcccgcacaccgcggacagcagcagcaggtcgcgggcgctaaagcgacggaaaacttttttgctcagcgcgaaaatcaccacttccgccacgacgccaagcgaccacaggtagcccaccgcggaggcggaataccccgcttcctgccagtagatagcgctaaatccgtagtaggcggcgtgcgcgccctgcagcaaacagacgcaggcgaggaagcgccagctttgccgcaccagcgtaagccaggccgccaggccggccgcttcctgctggcgggattcgccctgcggctgcaccgacggcttcagcagcatgccgagtagcatggaggcaataccgacgctgagcatcaccagtatcatccggtagtcatacaggctgaccagcttcccggtcagcgccgagccaatgacgaaagctatcgacccccacaggcgcacgcgcccgtagtccatggtgatctgcttttgccaggtattcgccagcgcgtcggtcagcggcaccagcggcgagaaaaagaggttaaagccgacgataatcaccatcagccaggcaacctggtggccgatccaaaatgcgagcgcaaagagcagcgtcagcagcgccagaatgcgcagagaagagataagacgggacgggtcgctgacccgcggcgcaatcagcaggctgccaagaaagcgcgacaccagcccggcgccgagcagcatgccgatggtttccggcgtcaggccaagtccggaaagccagacgctccagaaaggcaggaagatgccatagctaaaaaaataggtgaagtaacttagcgccagccagcgcgtggagtgtaagaccatgattccctcccgaatggaggcgacagtctggcgataaagcggggcgggcgcaagataccctcgccccagatatggcgctattcgcgcccctgtacgtctattttcagcgaaaaactcagcgtatctccggcgcctaaaacccgcagccccggctgtccgtccatgttatgggcgtttaccggatgactttgcggctcgaggcaaaggaacggctcgccctgcattctgaaaagcatcaaccacggagtttgcgaaagaattgtgatatccatcacatcactactcaccctcgcccgcccgctccagccggaatagcccacgttcagccagcgatcctcaccgtactgcgcgtggctgaaatcggcgtagccgggcaactggccttgccagccgagaggaagatgctgctccccttccggccagtagccggcggctgcaaactgcaccgtaccgcgcttatcaaaaggaaaaaacggatgaaaaccgcagccataggggatgggcgtgctaccgcagtgggtaagcgtcagcgcagccaccagctggttacgcagcagctggtagcggatctgcgccaggtaatcgaaaccgcaggcatgctgccgacgcagctgtaacacgcaatagtcgccgccgcgcgcaatcatatcccagcgctgcagccaaccgtcgccgtggagaaaaaaatgcgcgtcggcgtggtggcgaggcagaactatctcacgtccctgaaaaataaagcggttcccggcgacgcgattggccagcggcagcatcggaaacatgccgccggcggggttttcatacagcaccggcgcctgataatgccgcgagtataaactttgcactttgccgcccagagaagcgacgcgcatccgcagatgcgcgttttccagaatccactcttccgccattagcgcgtctgctcctgcttcatcgcctgagcgcccgcatgacgttgcgccagctgctcttccagggcttcgagagtgacccccttcgtttccggcacgttgcgcagaatatagaggtagccggcagcgcaaatgacgccatacagcaggaaactgcccgccgcgcccagtccggcattaagcagcgggaaagtgtaggttaacaagaaacaggcaatccacagcgccagggtgcctaaggacatcgcgagtccgcgaacgcggttggggaagatttccgccagcagtacccaggtaaccggcgccagggtcaaggcgtaaatagcaatcgccgccagcaccagcagcagaacgggccagcccatgatgcccatgccataggcggcggcaatcagaacatagatcagcgtcaaccctgaggcaccgagcagcattaatttacggcggccgattttatccaccagcggcagcgcggcgagggtaaacaccaggttgacgatccccgttgcgacgatcgatttcagcgtgctgttaatatcgaatcccgccgaggcaaaaatctcctgcgcgtagttaaagatgacgttaattccgcaccactgctggaagacggcgaggaccataccaatgataacgatcggtttaacctgcggagccagcagcgcgccgtaggatattttatggttatctttttccagcgtgtgcgcgatgtcgcgtaatatcctgtcggcatagtcggcggagccaatgcgctccagcgcggcccgggcgcgatccggcttaccggccttcatgagccagcgcggcgactcaggaacaaaaaacatcagcaccagaaacgccagcgccggcaccagttccgcgccgaacatccagcgccagcccatctgcccgttccaggtctccacaatcatctgctgcgtcgctcccgtcgccacgggttccgcaatcatcaggttgataagctgagcggccagcacgccaaccacgatagtgagctggtttatcgcaacaaagcgccctcttttttctgccgggctgacttccgcgatgtaaagcgggctgagcgcggatgccagaccaatccccaccccgcccacaatgcggtaaaccacaaacatgtcgaaactgctggcgaccgccgtcccccacgccgaagcgctgaacagcacggcggacagtattaagggcagcttgcgccccagtttatcggcgcaccatcccgagattaatgcgccgaaaacgcagcccaccagcgccgagctcattgcccagccggactgcgccgggtcggtaatggaaaaccaggcttcataaaacggctttgcgccgccaatcaccacccagtcatagccaaagagtaaaccaccgcaggcggcgaccagacagatagtccagacgtagcccattttcagatgtgtctgcgcgttattcataatgattcctctataagggaaacgcagggaacagtagggttcaggcgggccaggcccgcccgtttcaggttcaggaaaacatgccgctttgcagggcatgacgaatcagatgcgccttatcatgagccgggttcagctgcagcagccgctgcatcgcctgctggctggcggatacgttgcccagccccagatggcccagcgcttcaataaacaaacagtgctgctgatgctgctgctgcgcagaaacatcgagcaccaccagatccgggagagagacggcaaaaaagtcggcttgcggaacgtcatcccgatgctgcctggcccaggcgataaaattctggaagtgctgctcggcctgcgccggattaccgctcttacgcagcgcgatgccctgccagaaaaggtaatcggcgggctgatcgttgtagtaacgcccggcgtccagcgttgagcccccttgcagggcaagctggtaatattccgctgcccggtgcgcatccccagtctgttccgcgcaatagcccagcaaataccagatatcgttgtccgtctgcccgggcagccgcccctctcccagattatcgggatagcgtaacgcttcattcaggcagcgagcggcctgcgtgaacgccttacgttcgatcaactgtaaagcgcgatggagctgattgagcaaatactggccggtaactttcccctccccgccttcccagggatgaaatacgcgcgtaccgagaatagcggcggcatcggcgtaatggccggccgcgttccacaggcttaacagctcagcggtcaggtcatcccgcttcagcaccaccgctttgcgcgccgccagcgtttccagtcgttcgtttaccggcgtacccagtgattttttcaggaaatcaagctcaaagaggaagcgcgcgttttcgggctcaagctctacggcccgctgcagataagccagcgcctgcgcggcatcctgttgtttgttccaggcgtagacccccagcagacgatgagcgggcgcatagtcgggagatttttccagcgtctcgcgccagcagcttaccgcctcttcatagcgacgtttgctgtaccagaagcaaccgagcagatagcgggcaaaagcgctatcgctcagggtttgcagcatctggacttcatcgagcgtgttggggaaacgcacttttcgcacatggcagcgctcggcttcggcaattaaccgttgccgtttattcgcatcatcgcttaacgaggcgcgccacagcatcggcagcgcttcctggcaatccagaacctcaagcacctccttcgccgcctgcttctgaccgatggagagcagccagcccgccagcaggctgccgttgatccctctgcgccccgttacgcgcagcaggctcgcgcgcgcctcatcgcccggcgcaatcatccagcgcgcgcagtgcagcggatagctcaacgggtattgttcgaggcagaggacaatatacgcctgcgcttccttcgcccgcccgctgtccgctaacgccagcgctttcagccccatagccagatggttgctggcgttaaactgcaggctggtgttgaccttttccagcgcgtcggcggtatcgccacgcttcatcgccagccttgccagcgcccaccaggcggcatcgcggcagttaccgctccaggatgctttgtaatagcaatcccatgctccagcttcatcgccctgcctttccagcgcgctgccaagcagcatactggcttcgccatcgcgcggatttttattcagacgatgggcgcgaagtagcgcggcccgggcacattgctccgccagcccccagtcggcgcaattaaacgccagcgtcccgagggcaacattattgcggtaatcctgcggatcgagggctatcgcccggcgatagtaatccgcggcatagcggcttgcatgattgtattgttcaagatgctggccgataaaatagagctcatcgccgttgtgaatctcttccggcatcgccggcgcgcaggcaggttcgggcaggggcgtctgcggagtaatatgttcctgataatccagcagcggctggttgtctgcggttttcaccttaatggttaagcgccgggcgtcattttccggcagcgtatgctgccagctctcgccgggcttcagcgtaagctgagtttcatacagcggctgcttttccgcgctgagttcaacaacaatattttccagcggcgcaatggcgtgaacgccgagctgcagctgctccgtctcacgaaccagcttcagcgccagctgcgtattggcattttgcaccattcccagctcgctgtagggaaggaagttttgcacaaacaccttctcttcataaggcgcaagccaggtaaagtcaggctggttatcggtgtagacgccggtcatcagctcgatataggggccattttcgtcggtcagattgcggtcccacgcctggccaaagtcgccatagccccagctccactgttttttgcccggcgagacgtgatggtcggcaacatgcagcagtccaccgcgctcgtcgtggtgataagcgccgacaaagtcgtagtccgatttctccgccatatacgaggtgggtaccggaacatttttataccgggagatatcgacacccgcagaatagtccactttgtagtaggtgccggtggcgatgggaaaagcggaaacatcgcgcttgccgtgatcgaatacggcggtgacgtcgggtggaaacacgctctggtgagcatcgccgcctttgaccgccgggttggcccaccacaggaaatgacgcggcgttgcgttaccattaaaaaccttaccggtaatttcaatcagcgcgcggtcaggatagagagtaaacccggtcatgacctgtaaaccgcgcatgggctccgcttcccccatccatacggtctgcacgccgttttccccgcgctggatcgaaaaatcgaccggcataaaggttgtcgggcggtgatgctgcggccagttgaactcgataccgccggagatccagggccccagtagccctaccagagcgggcttaacgacttcattgtaatagacgaaatcgcgctgtttgactttgtcatacgcccggtgaatacgtccgccgagctccggcagcagcatgatacgaatgaaatcattctccatccatactgcctgataatcgcgcatttcacgctcgccggtcagggtatctatcacgccgtagggatagacgttgccggaggaaccctgataaacgcgcttttccagaaacatggggttcggatcctccgcccccgtcgtccacgtaggtaatgtaattgtttcctgccagaccttaaccgaaccgtacatgacgcctccactaaacgaaataaagtaaaacatgcaatgagaggagtttatatcgccatttagctgctaaaatgcgcaacgctcacgcaatatagttaagggagttaagtgtatgcagcgcaccggtttgaataacgcccgggtcaggcaggccaacaaatcaatttttctctcccacctctggcgggagaaacagctcagtaaatcccagctttcccagctcaccgggctctctattccggcggtgagcaacattcttgccgaactgcttagcgagggattgatcggccattccacggaaaaaatgagcaagcgcggcgtgaacagcggaagctaccagatccccgaacacggtgcctggacgctatgcatgaatatcacgccgaccagcattgagtatcagcttgccgatgcccgactgctggcggttgacggtcaccagcatttgcccatcgatgcccccacgccgcaggcccttctggaggccatcgtggaatgctggcgacgtatacaccgccgctacccgcagcacagcatcaatctcgcgcttggcgttcatgggcaggttgatccggtaaccggggtgtcacaaaccatgccccaggcgcgctggaaaacgccgattgaaataaagtatctgctggaggaacagctcggcgtgcaggtgcgggtggataatgactgcgtgatgctggcgctggcggagaagtggcagcatcagggtatacagccggatttttgcgtgattaacgtcgattacggtatcggctcgtcatttgtgattaacgatcagatttatcgaggaagcctctacggcagcgggcagataggacacacgattgtgaatcctgacggcagggcctgcgactgcgggagatacggttgcctcgaaaccgtagcgtccctcagcgcgttgaaaaagcaggcgcggatgtggcttaaaacgcagccggaagcgcagcgctctcccgagcaattaaccacggcatcgctcattgaagcctgggaacagggagacgtgcatattcgcgcatgggttgatagcgcggccaacgccattggcttaagcctttataatttcttaaatattttgaatattaatcagatctggctatacggacgcagctgcgcctttggcgaacaatggctggaaagtatcgttaaacaaaccggctttaatccctttgaccacggcgatacgccgcgagcgcacgccactcaaatcggctttggcaaactgacccgcgcccagcagctgatggggatcggttatctgtacgtggaggaacagctgcaaacgctgcgttaatcgtcagcggacgtggcggagcgcaaatttgtgtattacgtttaaatcacacgtctctcataacgagctgattatgaacactctacgctactttgactttggctcctcccgctctctgctgctgctgattgcgcgtatcgcggtggtggtgctgtttattcttttcggctatcccaagctgctcggctttagcggcacggtgcagtacatggcctcctccggcgcgccgatgccaacgcttgcggccatcattgccattattatggaagtgccggcggccattttaattgtgctgggctttttcacccgcccgctggcggtgatctttattttttataccctcggtaccgcggtgattggccatcactactggaatatgaccggcgatgcggttctgccgaacatgattaacttctggaaaaacatcagtattgccggcgccttcctgctgctggcgataaccggtcccggggcgatttcgctcgaccgccgctaatcaacaaacgcaaaaaaggccgcatcagcggccttttttatgtcaacgctaacgcttacgcataaaccgggaagcgtgcgcagatatccagcactttacccttcacgcgctcaataaccgcttcgtcattgatgttgtccagcacgtcgcacatccagccggccagctctttcacttccgcttctttaaagccgcgacgggtgaccgccggagaaccgatacggatgccggaggtcacaaacgggctcttcggatcgttcggcacgctgtttttgttgacggtgatattagcacggcccagcgcagcgtcagcttctttaccggtcaggtttttatcgaccagatccagcagaaacaggtggttttcagtgccgccggaaaccactttgtagccgcggttcaggaacacttctaccattgccttcgcgtttttcgctacctgctgctggtaaactttgaactccggctccatcgcttctttcagcgcaacggctttcgccgcgataacgtgcatcagcgggccgccctgggcgctcgggaatacggcagagttcagttttttgtacagctcttcgctgccgcctttcgccaggatcaggccgccgcgcggaccggccagggtcttgtgagtagtggtggtcacgacgtgagcatgcggaaccgggttcgggtaaacgccagcggcgatcagaccggcaacgtgggccatgtcgacgaacaggtatgcgccgatgctgtcagcgatttcgcgcatttttgcccagtcaactacgccggaataagcggagaaaccaccgataatcatcttcggtttatgttcctgagcctgcttagccatgtcttcatagtcaattttaccggactcatcgatgccgtaaggaatgatgttgtacagtttgccggagaagttgaccggggagccgtgagtcaggtgaccaccctgcgccaggttcatacccagaacggtatcgcccggctgcagcagtgcagtatagaccgcgaagttagcctgggagccggagtgcggctgcacgttagcgtagtcagcgccgaacagctctttggcgcgatcgatagccagctgctctacgatatcgacgtattcacagccgccgtagtagcgcttgcccggatatccttcagcgtatttgttggtcagctgagagccctgcgcctgcataacgcgcgggctggtgtagttttcggaggcgatcagttcgatgtgctcttcctgacgtactttttcttgctccatagcctgccacagttcggcatcataatcggcaatgttcatttcacgctttaacatccgcatctcctgactcagctaacaataaaatttcggcctaaaaaggcggtccacctggacaacggcccacagtataactgaatcattctgcgataacaggtcttgacaaaggattttacgcaaacgattggctccgcgttacacaaggctttgagcaataaagcaccttcgattatcaacggatttcttttcaggtttgtgatgcaaataattcatgttgtaactgccttatgggaaagtgttaaagaaccatttacaaagcagggttatttttataagatgcattttaaatgcatcattaagataacctataaaggaagctgctatgctcgacgcacaaaccatcgctacggtgaaagccaccatccctctgctggttgaaaccggtccgaaactgaccgctcatttttacgaccgcatgtttgctcataatcccgaactcaaagaaatctttaatatgagtaatcagcgcaacggcgaccagcgcgaggcgctgttcaacgccattgccgcctatgccagcaatcttgagaacctgcccgccctgctgccggcggtggaaaaaatcgcccagaagcacaccagcttccagatccagcccgagcagtacaatattgtcggcacccacctgctggccacccttgacgagatgttcagcccgggtcaggaagtgctggatgcctggggcaaggcctacggcgtgctggccaacgtctttattaatcgtgaagcgcaaatctacagcgaaagcgccagcaaaaccggcggctgggaaggcacccgcgcgttccgcatcgtcaaaaaaacgccgcgcagcgcgctaattaccagctttgaatttgagccggtcgacggcggcgcggtagcggaatatcatccaggccagtatctggcggtctggctgaagccggaaggctttccgcatcaggaaattcgtcagtactctttgacccgcaaacccgacggcaaaggctatcgcattgcggttaagcgtgaaaacggcggccaggtttcaaactggctgcatgattctgcgaaagaaggcgacgtgatttatctggccgcgccggccggtgatttcttcctcaacgtggcgccggaaaccccggtcacgctgctctccggcggcgtcggtcagacgccgatgctggcgatgctggatgtgctggcaaaatcgcagcatccggcgcaggtgaactggttccatgcggcagagaacggcgacgtacacgccttcgcggacgaagttaaaacgctgggtgaaacgctgccgaagtttacttctcacgtctggtaccgcagcccgagcgaagcggaccgtcaatccggcgcgtttgacagcgaaggtttgatggatttatcggccctggccgacaagatcggcgacccgcagatgcagttctatctgtgcggcccggtggcgtttatgcagtttgccgcgaagcagctggtagatctgggcgtgagcagcgacaacattcattatgagtgcttcggcccgcataaggtgctgtaaaacgttatcgatgacaggccgggataccggcctgtggactctgttaagataacctaccctattttcgcgaccgactgtctgacgatcaggtcagcggtgaggcgcttaactcttttgcttcccttttctttgttctcaattctggaaataagcaactcagccgccgttaagcccagctgatatgcaggctgcttaatcaccgttaacggcgtcgggaagaagcttgcccaccgcggatcgtcgaacatcaaaaaagagatgtcatccggcaccgccagaccacatttataaatcgcagaaataactccttcaccaataaagtcatttgccgcaataatggctgaaggccgctttttcccggtcagattgttaataacttcactgctggtcctggcctgcagcttgcccgtatctttcaccagcaaaacttcgtgagcaatatctgattctgcttccgctattgcgctttgaaacccgttcaggcgttcatcaaatgtggtaatggctaaatcaccagtacagtagagaatatttttgtgcccctggctgataagatagttggtagcaagcttcatgctttcatagttgctaattagcacctgatcgctggaatcaagcccggacaggcggtcaacctcgacaatcggcagatgctccagcggtctaatgttatttattgactgatgtgtcggaacaataataagcccctgaagcatattactttttagcaggtcgataagctctttttcggtagtttcatcttctgaagaggtaccaaaaataacggtatagccattatcgatcgcaactttctgaatggcggtgatgatttcaccgtgaaataaattggtaatatcggatacgatcacgccaatggttttcgactcaccgctacgcagctttctggctattgcgttcacctcataccctacttcttgtgctgcaagtaacaccttctctcgggtttccttcgtcacgagccccgaatcgcgtaatgctctcgaaacagtagagttggataaattaagttttttagcgatatctgcgatgcttgccatattcttctcttaagacgatccgtcgttcttttcattcaatgactctatgaccaacgccaggtcactcacacattctggcacgccccttgagtcctgacatccaattaaactcttcagctattcaacaggttacttcacataaccattttctggcaattcctgtcgccgcgaactgtaaaagccgtcaaatgactgatgatcgctttctgtgatctctctctcttttcgatcgccatcccccaggctagaatccacaaaaaatgacaacgttgtcattttgcataaattaaaaattaatacatttaaaacaatcaattaatacacaaaattcaaatattaaaaaacataaaaagacaacgttatcatcaataaggagcactaaacatgttgaccatcccactgatcgaagccaccgcagaaagcctggccccttacgcaaaactcatcggtttaccagcaaacagatccccttctgtagatcgtaccgatatcacttactttcacgatatttgcgatgcaaatgacttcaccaatataccggtagccagcttcctgaaagcgaaaccgcacccttttgtgctgtccaatattgaacgtcacatgcagaccgaagaggccgtgatccccttaaccggtgagagcgtgattgttctcgggccagtgggtgagtttgatatcaataaactggttgctgtccatcttgatggttctttcgggatcatcatgcgccgcaacgcctggcattttgcaccgtttccattagatgaggaaaatgccacctatatgctgctatccggccgccacactcctgacgatattgaagtgctggatattgatacggtgattgtgccccaggtgaagaaggaggagcgctcaaatgcctcatgctaatccttcatgtctgctggcctgcgaaatcctctgggactgcgttgaagatcaccctcctcagcagggaggcgctacccttaatgtagcttatcatctgcaaagattaggttgcagaacgatcccggtatccagcgtcggtagcgacaggctcggcaatcagtcactcagcattattaaaaatgagtggtgctgcgatattagcgaaatcaaggtgcttaaagatgtgggaacgggcgttgttgatgtcaaaatcgacgctgcaggcgatgcaacttataacatccatacccctgcagcctgggattatattagcatcagccacagcgccaaaaatcttgcctgcagcgcctttgtttacgggtccgtggctttgcgcagcgcattcaaccagcgcgctttcgctgactttttacagatatatcaggggctaaagtgtttcgacgttaacctgcgcgaagggcaaaataatatccagattgtaggcaattttttacagcacgctgattttattaagttaaatgaaagtgaactggagcaggttgccgctcattttcatattaccagtgaaaatattgaagaacggatctttgccctgaccagcattattggtcacaagattatttgtatcacccgaggcgataaatctccggtgctttactgggaaggtaatatttaccacgggcaagtcatccgtgtagacgttaaaaatactatcggcgccggtgatgccttctttgcagccatgatcaacgcgttaattaaccctgacttcgaccccacgacagcgctatataaagcctcggcgttagggtcatgggtggcgacgaaagcaggcgcccagccggaatatgacaacaatataatggataaactttttaactaccaggcggtgctgtgatgaaaaaaacaggattgttcatttctcctgatggtaataatcaattcaagatcttctgcatcatctcgatgctgtttctggtccttggtttcagcaccggtatgatcgatatcctgaataaacattttcaaaatacgctcgagatcaccaaagcaaaatcggcgctaatccaatttgctaactatattagctattttttcgtcgctatcccggccgggatcctggcgcagcgctatggatataaatcggggattattataggcttagtgctgattatgtgcggtaccagtacgtttatgctcgcaacggtgcacggcgaatattttttctttcttattggtatttttattctcgccgccggactgacctttatcgaaaccatcgccaacccatacgtcattgtcctcgggaataaagacggcggtgcggcaaggctgaatatttcacagtctattgcgggtctcggcctgatctttggcccgctgatcggcggccattttgtcctctctgccacgggtgaggtgtctaaaaccaacgatggactcttcgtcccgtatctggggattttccttgcggtgacgctgattctgctggtcttcttcagaaccaaagtgcctgaggtgacgccggaagcagatgaaagaatcggcgcgaccgagaagcccttctggcagctaccgcattttgttttcgccgtcattgcccagttcttatacgttgccgggcaaacgggtatcttcagcttcttcatcaactacgttgtcgaacactcgccagccatgacgctcggtcttgccagcctgctgccatcaacatggacctttagcacggggagcttctaccaaattaccgaacgcggtgcgtcacaaatactggccttcggcggttttgggctctttatgattggtcgcctgaccggaggaatgctgctgagcaaaattaaaactcaggtggttctctccacctttgcgttaatcaactcagtgttgatggttattattatttattcagatggttatctggcaacaatctctttagttctgagcttttattttatgtcgattatgttcccggctattttctctctgggtatcgcgggacttggcggacaaaccaaaaaagcctcatcgattattgtcatgtccatagttggcggagccgtaatgcccatacttatgggcgctatcgccgaccattacgatatggcaacgggttttatcatgccgctaatctgctttgcgttcattctattttacgccttagcctggaccaaattatatcgtggacagaatagcgaaatcgcgcccagctattaattcagcgaaataaatttaattttaattaatcaggaataatactatgaaaatctatgttgatactgccgatctcaatgaaataaaactgctggaagaaaatctaccgctggccggtgtaaccatgaatccgagcatcaccgcgaaatccggcattgcgctatcggttcttattccgcaaattcgcgctatgctgggaaaagacaggatgatcttcgctcaggtcattgcctccgactgcgcgggcatggtggaagaagcttgtcggctgagtgcaatggatgaaaatatcgttattaaaattcccgtcacgtcggaaggtttgaaggccatcaaaaagctgaaatcccatcaggtcagaacgctgggaaccgccgtgtataccaccacccagggtttgctggctgcgctggccggtgcggaatttgttgccccctatttcaaccgcattgaggcgctgtccggcaacggtcttgagacagtcagcgccctggttaagatccttgctttgcatgccccccactgcaaagtgtttggtgccagctacaaaaacaatcagcagttcctcgactgcctgctggcgggctgcgaatgcatcacgctgcctaccgacctggcaaaaaaccttctgcaaaaccctgccgtcgatgccgctgtggcccagtttcagagtgactggcaatccgcttacggaagccttgccatcaaataatcaacgtataaatcaaggaaaagattatgagcgcaaaaattatccagtcaccgggtaaatatattcagggggcaggacttttaaattctgtcgctgcctatgtcaaacacctgaacgcgaaatttttagtgcttggcgatgcctttgttatgggattgacgcaggaaaagcttagcgccagctttaaagaggccaatatcacctgtcaattttctacctttagcggcgaatgctcccgcaataccatcgcggccattcaggcagaagccgaggagaatcagtgcacggcaattattggtattggcggcgggaaaaccatcgatgcggcaaaagcggtagcctggtacatgaacttgccgctggtcattatcccgacgattgcgtctaccgatgcgccttgcagctcctggtccgtgctctataccgatgacggcgagttcgacgcttatctcgacctgcctttcaacccaacgctggtgctggtcgatacgcagatcgttgccaacgctcccgtgcggctactggcggcaggtatcggtgatgcgctggcgacctggttcgaagcccgcgcctgcataaaaagctcggccgcgacgatggcaggcggacttcccaccgtcgccgcaaccggtatcgcccggctatgttatgaaacactgattgccgatgccagaaaagccatccttgccgtcgagcgccatgtggtgaccgaagccgttgagcgcattgtcgaagcgaacacctatctgagcggcgtaggttttgaaagcggcggcctggcggctgcccacgctatccacaacggctttaccgtactggaagagacgcattcgatgtatcacggtgaaaaagtggcattcggcacgctcacccagctgatgctggaaaatgcgccgactgaagaactcgataccgttatccagctgtgcatcgacgtcggcctgccggtgacgctcaggcagctaaacgtgacggatgatatcgaaaataaaatgcgcaaagtcgccgggctggcctgcgtggagggagaaacgatacacaatatgccgtttgcggtgactgaggagagggtttatgcagctttactcgccgccgatagctatggatccgcatttatcaatgcccaaaaaacagcacgataagccctaattcaaaaacatagtcagctgccccggtgacatcaggtaccggggctttttggatggcttaaatcgccgcgtcgtcttcttcgccggtgcggatacgaatcacgcgcgcgacatcgaaaacaaagatcttaccgtcgccgattttgccggtctgcgccgtacggataatggtatccacgcaggtatcgacgatatcatcggtgacaacgatttcgattttcactttcggcagaaaatcgaccatatactccgcgccgcgatacagctcggtatgccccttctggcggccaaaacctttcacttccgttaccgtcatcccggtgatgccgacttcggccagcgcttcacgcacgtcatccagtttgaagggtttaataatcgcatcaatctttttcatggtgttcctgttttagtcgcgtaaccggttgctaaccgtatcataacttgcgtcatcacgcggagctactctttaaagtcgttagcgtcgagctcgtggcgcgacagcagcttataaaattcggtgcggttgcgccccgccatccgcgccgcatgcgtgacgttgcctttagtgatttgcagcagcttgcgcaggtaattgagctcaaactgattccgcgcctcaacaaaggtcggcagcgcggtgttttccccttccagcgcctgctccaccagggcgtcgctaatgaccggcgaagaggttagcgccacgcactgctcaatcacgttcaccagctggcgcacgttgcccggccatttggcggccatcagccgcttcatcgcatccgtggagaatgcgcggacaaaaggtttatggcgatcggcagactggcgcagcagatggttcgccagcagcggaatatcttccgtacgctcagccagcggcgggattttcagattcaccacgttgagacgatagaacagatcttcacgaaattcgcctcgcgccatggccttcggcaggtcgcgatgggtcgcagaaataatccgcacatcaatatcgatatcgcgattgctgcccagcgggcgcactttacgctcctgcagaacgcgcagcagtttcacctgtagcgcaaccggcatatcgccaatttcatcaagaaacagggtcccgccttccgcggcctggaatagcccctcgcgattgctgactgcgccggtaaaagcgccgcgcgcgtggccgaacaattctgactccagcaactgttcgggaagcgcgccgcagttaatggcgacaaaaggtttatcacggcgcgggctggcgttatgaattgcctgggcgacaatctccttgccggtaccgctctggccgttaatcagcacgctgacgtccgactgcgccaccatcccggcctgctccagcagtcgctccatcagcgggctacgggtcacaatcgcctgacgccagcgctcgtcggtggttggcgcgctctgctccagcgcgtcatcaatcgctttataaagggcgtctttatccaccggcttggtgagaaagctaaacacgccctgctgggtcgcggcaacggcgtccggaatggaaccgtgcgcggtgagaatgatcaccggcatccccggctgaaccttctggatttcgctgaacagttggagtccgtccatctcgtccatccgcaggtcgctgaccaccagatcgaccttgtcgcggctcagcgtgcgcagcgcctccggcccgctctcggcggtcagtacgctatacccttcgctgaccagacgcatacccagcagtttcagcagccccggatcgtcgtccactaatagcagacgggcgggtttacggatcgtcatgaatcacctccgggactttatcgccgccgtgcccggcgtcagagctgaagttcccgccgggtttacggctggagagctgacgctcgatatcggtgagattctccagcttgcgggtcgtcagttcgagctgactgcgtagctcaatttcctgctgacgcagcgtctccagctccgcatcgcttgactgctgcaatttggcgtagcgggagcgctcctcaatcagctgaagctgccggccctgggcatcgcgccagagctgataaagcgggcgaacctgggcggcgatttgcgggctgaaggcatccagactggccaccagatcgcgacgttcgttgggcgtgattttggcatcggccagtaaaatgccgcgtttaaaggcatcctgccagctgtcggcatcgtgctgccgggcttcagcccgcgcctgtaccggagcaaggcggtccgcgcagtcaattccccgcagccagtaaagcgggtttttatcactggcctcgctttgcaggctccagatgtcggcgcactccaccgaaagaaaatcggcgacctggtgctgcggcagcgcggagagcgttttgccatccgcggcgtgtggtgatgtagaggcggaacatcccgccagcgccaggcaggacatgcctgacaacagccatcccctgaggggacggacaagtgcgaagaagtgggacatattcacccgatagttatacgttattttgtccagactcggcgacggggagcgtgatacgaaaacagattagccctgatttatcatcaaccaggctcagctcgccctgcatttgccgtacgcagtcgcgggcaatgctcagccccagaccgctgccttttaccgcccctttacgctggtggcttccctgataaaaaggctcaaaaatcatgtttctctctgcgggcgggatcggctcgccgtcgttaatgacgtcaatgcgcacctgctcgccgtgccgatagctatgaatgcgaatgttaccggattcagcaccatagtgcaccgcattggagtagagattatccaggacgctcaccagcagagcgggctccgcttcgcataaacgctcgctgagcaacagttcggtatgcatcattttagctcttgccggcaggctatgggcagaaaccacattttccaccagttcggccaggtttaccgtctcgcgcgcaatcgggccatcggcctgtttacggttgtaatccagcagctgctcgatcagcttttgcaggttgcggctgctgttatcgagaatttcaacgatctcctgctgctcgagcgtcagcggcccggccacccggtcggcaagcagctccgtcccttcgcgcatgctggccagcggcgttttcagctcatgggaaagatggcgcaggaactgatgacgctgggactccagccaggcaaggcgttcgctcagccagataatgcgtttaccgacggagcgcagctcgcgcggaccggtaaacagcgcggcgtcgtccagcgacttcccctcccccagtcggttgatcattctctcaatgcccttcaccgggccgataatcatgcgggtgaacagcagcaccagcgccaggctgagcaggaacagcaccagcgcctgccagccgaagaactgcccgcgctcggcgatttcctgctgcagctgctgcccgcgcgaatagaccaccgttcgggttgcctgcaccatgtcgctattggccgaggcaaacgcttccaggctggcggctgacttcgccgccggaccgctatttttacactgcagctcggccagatcgtcgagatcctgacgcagcgcctgccagattttctcatcgggcaggacgcccgcgtgagcatcaagcatttcgctgtagcgttggcgctgattctggtagacccgcgccagcgtcggatcgtccagcacgcagtactgacggtagctacgttccatctccagcgatgcgttaatcatcgcttcgctgcggcgggcgtcgataagggtagtacggttgatatgcgccgcctgcgcgctcagcgcgttgaggctttgccacgcctgccatgccagcaccagcagcggcagcaggatcagcacgaaggatagcgtgaccagctggcgcagcgaacgggggaaaagggagagtcgcttcacggatagggtctcaatcattagctcatgacgatgctaaccgaggacgcaataaacatctacgccggaaataataaagccaggctacaggagcctggctttattaagaaatgaggcggtgccttactcgacgtttcgcccgatgactgataaagcggagctgttatcaggagttggacggcaggcacctgtttgtgcgtcattcgaagtttatgtagcgcgtcccgaaggggctgacataagaaggtgaatgagccactggttataattatgcacgaactatgccacatctcaaaacattttattaacacaatgaaatataatacctttttactattcatgggcatgaatgatgatggtcggttttcgcgcaaagtgtcgctgattagcaacaccggatgaatggtttagcaatgctattataaatcaataagttaagtgtcaccttttgacgacaccgctatagcgcgtttgtcggcgatccccgacacctgctgtcgatacgcctcaccaataaaaaagccccctgcgcgggcaggaggcttaatgcgatttgtgagcggttttagcccagctgtttacgcgcgttgcggaaaatacgcatccacgggctgtcttcgccccagttttccggatgccaggagttcgacacggtgcggaacacgcgttccgggtgcggcatcatgatggtcgcgcgcccgctttcgctggtcaccgcggtgataccgttcggcgaaccgttcgggttagccggatagttttccgtcaccttaccagcgttgtcgacgaagcgcagcgccaccaggcctttactttccagctgcgccagatgcgcgccatcgcgaacttccacctgcccttcaccgtgggatacggcaatcggcatcattgaccccaccatcccctgcagcagcagagacgggctctgggtcacttcaaccaggctgaagcgggcttcaaagcggtcggactggttacgcacaaagcgcggccacagctcgctgcccgggataagttcgcgcaggttagacatcatctggcagccgttgcacacgcccagcgccagggtttgcggacgatggaagaaggtggcaaattcgtcgcgaacccgctcattgaacagaatcgatttcgcccagccctcacccgcgcctaaaacgtcaccgtaggagaagccgccgcaggccaccagcgcctggaagtcagcaagaccggtacgccccgccagcaggtcgctcatgtgcacgtcgatggcatcaaagcccgcgcgatggaacgccgcggccatttctacatgggagttcacgccctgctcgcgcagcaccgcaaccttcggacgcgcgccggtggcaatataaggcgcagcgatatcctcattgatatcgaaggagagcttcacgttaaggcccggatcggcatcgttggctttcgcctcgtgctcctggtcggcgcactccgggttatcgcgcagacgctgcatttgccaggtggtttctgcccaccacatgcgcagcgttgtgcggctttcgctgaataccggatgaccgtcggcctcgatgacaaagcgatcgcccgtcgtggcctggccaagatagtgaacgcaatccgccagaccatgagcggccagcagcgcttccaccgcctggcggtcggcggcacgaacctgaatcaccccgccaagctcctcgttaaacagcgcggccagacgatcctcgccgagcgcggcgatatcaaccttgacgccgcagtggccggtaaaggccatctcggccagcgtgaccagcaggccaccgtcagaccggtcgtgccacgccagcagcttaccttcggccaccagcgcctgcattgcgtcccagaagcctttcagctgtgcgacatcgcgcacgtcggcggtcacatcgccaagctgacgataaacctgcgccagcgcggtcgcgcccagcgcattgttccccttgcctaaatcaatcagcagcagggcgttgtcttcggtcgcgagctgtggggtgacggtacggcgtacgtcttccacgcgggcaaaggcggaaatcaccagcgacagcggagaggtcatctcgcgctgttcagtgccttcctgccagcgggttttcatcgacatagagtctttacccaccggaatggtcagtccgagggccggacagagctcttcgccaaccgcttttaccgcttcatataaaccggcgtcttcgcccgggtgaccggctgcggccatccagtttgccgacagcttcacgcgattgagcgcgccaatctgcgtcgccgcgatgttggtcagcgcctcgccgaccgccagacgggcggaagcggcaaagtccagcagcgccaccggcgcgcgttcgccaatggacatggcttcgccatagtagctgtcgagactggcggtggtcaccgcgcagttagccaccgggatctgccacggacccaccatctgatcgcgcgccaccataccggtgacggtacggtcgccgatggtgacgaggaaggttttctccgccacggtcggcaggtgcagcacgcgattcaccgcgtcggcaatagtgattccctggcgttccagactctgaccctgggctttgagcgtctgcacgtcgcgggtcattttcggcgttttgcccagcagcacgtcaagcggcaggtcgatcgggcgatcgtcaaagtgagtatcgtcgaggctcagatgcagcgcttcggtcgcttcgccaatcaccgcgtacggcgcgcgttcgcggcggcacagctcatcaaacagcggcagctgttccggcgcgaccgccagcacataacgttcctgcgattcgttacaccagatctccagcgggctcatacccggctcatcgctgaggatatcgcgcagctggaatttaccgccgcgtccgccgtcgctgaccagttcaggcatcgcgttcgacagaccgccggcgccgacgtcgtggataaacagaatcgggttagcgtcgcccagctgccagcagcggtcgataacttcctggcaacgacgttccatttccgggttgtcgcgctgtacggaggcgaaatcgagatcggcatcggactggccggaagccattgaagaggccgcgccgccgccaagaccgatgttcatcgccggaccgccgagaacaatcagcttcgcgccgacgacgatctcgcccttctgcacgtgttcgccgcgaatgttgccgataccgcccgccagcataatgggcttgtgataaccgcgcagctcttcgccgttgtggctgctcactttctcttcataggtacggaagtaaccgttgagcgccggacgaccaaattcgttgttaaacgccgcgccgcccagcgggccttcggtcatgatatccagcgcggtgacgatacgctccggcttaccgaaatcctcttcccacggctgctcaaaccccggaatacgcaggttggaaaccgagaagcccaccagacccgctttcggcttcgcgccgcgcccggtggcgccttcatcgcgaatttcgccgccggaaccggtcgccgcgcccggccacggagagatcgccgtcgggtggttatgggtttcgaccttcatcagaatatgcgcgtcttcctggtggaagtcgtagcggccggtttcgtggtcggcgaagtagcgccccacggctgaaccttccattaccgcggcgttgtctttataagcagacagcacgtagtccggggttttctcgaaggtgtttttgatcattttaaacagcgacttcggctgcttttcgccatcaatgacccagtcggcgttaaaaatcttgtgtcggcagtgctcggagttagcctgcgcgaacatatagagttcgatatcgttcgggttgcgacccagcttctggaaagcatcctgcagatagtcgatttcatcatccgccagcgccagccccagacggaggttggcgtcaatcagcgcctgacggcccaggcccagcagatcaacgctggtgaccggggttggctgatggtgggcgaagagtttttcaccctcttccagcgcgccaaagacgctttccatcatgcggtcatgcagttcggccgccacctgcgaccactgttcgtcattcaggctgctcgcttcgacgtaatacgccacgccgcgctccaggcgcaaaacctgtgacaggccgcagttatgggcgatgtcggtagctttagaagaccagggagagatggtgccgggacggggggtaacgagcagtagcttgccggtcggggtatggctgcttaagttcgggccatacttgagcaatcttgccaggctctcgcgatcgtcgccgctgagcggggcgctgaggtcggcaaaatgaacgtactcggcataaagggtgctgaccggaaggttggccgcctggaaacgtgccagcagtttattgatacggaatgccgacagtgcaggtgaaccacgcaaaatttccatcataagtctctcgtcttcgaagctttcatggtgagccaggggggaaacgggcgccattatagtgaatcctgcgccccgacgaaaccgtttgcgtagaaataaaatgattgccggggtttatcaattaatgtgactcatctcgcgaataagttgccaactggcgcattcttaagcaaaatgccgctcattccaggacaaccttttactttttctggtcataatctgctgaggaacgcgaagctgcagaagattaactatctgaaaaaactaaagattaattatctgctcatcggcattgtgaccctcctgctggcggctgccctgtggccgtctctcccgtggatgggaaaaccagaaaaccgcgtggcggggatcatggcgcgcggagaactgcgaatcagcaccattaattcgccgatgaccttcgcgaccatcaatgacaagacctacggttttgattatgagctggcgcagcagtttgccgactacctcggcgtcgagctcaaagtcaccgtcaggcagaatatcagccagctattcgacgacctcgatgaaggcaaagccgacatgctggcagccgggttggtctacaactccgagcgggtgaaaaactatcaggtcgggccgacctactattccgtttcgcaacagctggtgtatcgcaaaggcaacctgcgtccgcgcaccctggcaaacatcaccgccgcgcagctggccatcgctcccgggcacgtggcgattaacgatctccaggcattgaaaaagcaaaaatatcccgaccttgagtggcacgtggacgataagcgcggcacgacggcgctgatgcaggcggttatcgatggcaaactcgactataccgtcgctgattcggtcgccgtcagtctgttccagcgcgtccacccggagctggccgtcgccctcgatatcagcgacgaacagccggtcacctggtttagcgaaaaaggtgaggataattccctgccggcggcaatgctcgatttcttcaataacattaacgaagatggcaccctggcgaggctggaggagaaatacctcggccacggcaacgattttgactacgttgacacccgcaccttcctgcgcgccgtggagagcgtcctccctgacctgcagccgatgtttgaaaaatacgcccgacagatagactggcggctgctggcggctatctcatggcaggaatcgcactgggatccgcaggccacctctccgacgggcgttcgcgggataatgatgctgacccgcaatacggcgcaaagcctgggcctgaccgatcgtaccgacgccgagcaaagcctcgacggcggcatgcgttatttacaggacatgatgaataaagtgccggagtcggtcccacaggacgagcgcatctggtttgcgctggcggcttataatatgggctacgcgcacatgcttgacgcgatggcgctgaccaaaaagcagaaaggcaacccgaatagctgggccgatgtgaagcagcgtctgccgttgctaagccagaaaaactactacagccgactgaagtacggctttgcgcgcgggcacgaagcctacgcctacgtcgaaaatatccgcaaatatcatattagcctcgtgggctatctctctgaaaaagagaaaaaaagacgcgcagatggcggccttaggcgaacactatccggcagtcatgccggatgagctggataaagaagagcagtacaccaggtccttttttaactttcgcgccgaaacgctggtcgataacgcaaaattaaaaatccccggaatggggcattaatcctgcgcctgttggcccgctcgctttagcgcttttttctcttcccgccgccagcggaagaaatcgctcagcatgccggaacaggcctccgccataacaccttccgctatttctacccgatggttcatgcccggatgatgcagcacatcaatcagcgacccggcggcgccggttttcgcatccctggcgccaaacaccagtcgggaaatacggctgtgcaccattgccccggcgcacatcacgcagggctcgagagtaacgtacagcgttgcgtcaatcaggcgatagttttgcaacaccagcccgccctgacgcagcgccataatctcggcgtgcgcggtgggatcgtggcggccgatgggccgattccagccctcgccgatgacctgatgattatgcaccagcacggcgccgaccggcacctcgccctcttcccaggcgcgtttagccagcgtcagggcgtgacgcatccagtattcatcatttaattcatggtcagacaaagcgggcactcctgcagaaaagcggggcgcattatacatgggcgctatgtattacacactattctaactgctgaagatcgccctgcggcgttacccgccagcggtgctggcaaaaagagagcagcgggttgtcctgctcgctgtcgctgtagccgctatacaagcgcagcggtgcgccgatcttttgttccagctgcgtcactttttcattaccgagacagcgcagggttaatccccagccgccgtagcgtcgctccattcggctggcgatcagattcacccgcggcagccaggcggtatcaaaatagacctgttcaaccagcgactgcggcgaaccggtgatcagccagacgtcagcgtccgtgctggtcagataatgtttaagccgcgcctgaacaaccgggaatgccgtgacgtgctggcgaaaccagcgaacaaaattggcctccaggcgtttaagctgctgctcgctgcgtccgaaggttgatgcccagagcagcaggctcatcggccagcgcgcggcgcgaccgtataacatcagtccggccgcgataaccggcaataaaggaagcagcagcagcgcgttcagtggctgatggcgcagggcatagcgcaaaaagctgccgaacatatcctgctgatgcaaggttccatccagatcaaagaaaaccactctccgcgtgctgctattcaaaacccactcccctgaacgatcgcatgataaccaatagcttaacagccttacgtcgccaatagcgaaaacatacgctgctgttgaatccgtattaagaaaacgtctttgccgagaaatcttaggcacagaatttttaattcgcgataatcctcttataatcgaatacaaaattctttcagcgagggtgaagctgtcctccggagccgctatgaactgtttgacccgtattcgccagcgctatccgacgttggccgcaagcgataaaaaactggccgatttcattctggctcaaccggatcaaacccgccacctcagctcgcagcagctggcgggcgaagccggcgtcagccagtcaagcgtagtgaaatttgcgcagaagatggggttcaaaggcttcccggcgttaaagctggcgttgagcgaagcactggcaagcgcgccgactccgcaatccgtaccggtgcataaccagattcgcggtgacgatcccctgcgcctggttggcgaaaagctgattaaagataacgtcgcggccatgcacgcctcgctggacgtcaacaccgaagagaagctgctggaagccgtcacgctgttgcgccacgcccgtcgggtcatcattaccggcatcggcgcgtcgggcctggtggcgagaaactttagctggaagctgatgaaaatcggcattaacgcggtatcagaacaggatatgcacgccctgctggcgacggtacaggcgatgtctccggacgatctgctgctggccatctcctattccggtgaacgacgcgagatcaatatggcggccggtgaagcgctgcgggtaggaagccagatcctggcgatcaccggctttaaccccaacgcgcttcagcagcaggcaacgctgtgcctgtacaccattgcggaagagcaggccacgcgtagcgccgcgatctcctccaccagcgcgcaaatgatgttgaccgatctactgtttatggggctggtgcagcaggatcttgagcacgctccggagcggattcgccatagcgaagcgctggtgaaaaagctggtgtaaccccgagtgccctgcccgctgccaaaagcacactctctcttattggctcagaccgggctaaatttctccgctgcggatggtcgccccgcggtggaaaagagctggcccgggcgaaaaatgggcgtataatgcccgccctgtttgtgttgtttctgagaatttcctgatggcgctgttaatcaccaaaaaatgcatcaactgcgatatgtgcgagccggagtgcccaaatgaggcgatatccatgggtgatagcatttatgaaattaacagcgatcgctgcaccgaatgcgttggccactatgatacgccgacctgccagaaggtgtgcccgatcccaaataccattctgaaagatccggcccataacgaaaatgaagagcagctgtgggataagtttgtcctgctgcaccacgcggacaaactgtgatattgccggatggcggcgttaaccgacctctccggcctgtaacactctagctttcgataatcaccgtggcgcaggcatagtgacgctcgtcggccagcgtcacgtgaatgctgcttacgcccatacgctcggccagactcttcgcttcgccccacaatcgcagctttggcttacccagctcgtcgttgtaaacctcaaactgattaaacgccagcccattgcggatgccggtaccaagcgccttggccgccgcttctttaacggcaaaacgcttggccagaaaacggaccggctgctgatgctgttcccatatcgcccactcgctatcgctcaggacgcgacgcgccagacgatcgccgctgcgggcaattaccgcttcaatacgggcaatttctacaatatcagtacccagtccgagaatggccatcaggcgcgcgcttcctgcatcaaacgcttcatttccgccaccgcctctttcaggccgctcatcaccgcacggccaatgatcgcgtggccgatgttcagctcgtgcatttccggcagcgcggcaatggccttcacgttatggtaggtcaaaccgtgaccggcattaaccttcagccccaggctggcggcataggtcgccgctttggcaatacgctccagctcttttgcctgctcagcgtcagtttgcgcatcagcgtagcatccggtgtgaatttcgatataaggcgcgccaacgtccgctgcggccttaatttgcgcgttgtccgcgtcaataaacagcgaaaccaggataccggcatcggcaaggcgtttacaggcgtcgcgcattttgtcgagctggcccgccacgtccagtccaccttcggtggtcacttcctgacgtttttccggtaccaggcagcaaaaatggggctgagtctcacaggcaatcttcagcatctcttccgtcaccgccatctcaaggttcatgcgggtatccagcgtctggcgcaaaatacggacatcgcgatcggtaatatggcgacgatcttcgcgcagatggacggtaataccgtcagcgccggcctgctcggcgataaaggccgcctggaccggatccggataagcggtaccgcgagcgttgcgtaatgtcgcaatgtggtcaatattgacccccaacagtaattcagccatgacaatcctcgttaatcgttatttgttttatcggctcgcgctgcccgcgcgggcaaaaactgacgaaaaagctcgcgacttttaagcggcttcccgcccagatagggcttcagggcgatacgggtgaaacgctttgccgcgcgcagcgcatcgctgtccggaaattcacggctcgccagcgccttaagatggtgcccggtaaaggtgttgttatcaataaccacgctggcgataaagcctttttcttcacggtagcgataggtcattgcgtcgtcaaccgcttctccgctgccggcgcagtgcaggaaatccacgccatatcccagatgccccagcagcgccagttcaaaacgccgtagcgccggttccggcgagccgcttgcgccagccagagactggatacagtgcaaataatcgaagaagagttcggaaaagcgcgtttcgtgctcaagcacgcgagagagaagctcgttgacgtaaaggccgctgtagagcgtgatgccgctgagagggagcgccagcgagacggcttccgcgctgcgcagcgttttgacttcgccgcgcccgccaaagcgaagcagtaagggagtaaaaggctgaagcgcgcctttgaggttagaacgtttggaacgtgcgcctttagccacaaggcgcacgcggccggattcttccgtgaagacgtccagcatcaggctggtttcgctccagggacggctatgcagtacgaaagcgcgttgccagccttccatcatactcgtcgtctttcaagccgcaggtgcgttggctgcgcccaatcaccccagtcacttactgaagtaagctcccggggactcgcggtcttgccgcgtgactcagcctctggcctcgctccttcgcagccagcgcaagcgctgttcaaaacacgttgtgttttgtcctgcacctcgaaagccatagagtatccaaacttagagatcgtcgccgtaaccgagactgcgcagcgcgcgttcgtcatcagcccagccggacttcactttcacccacagctcgaggtgaaccggcgcttcaaacatatcctgcatgtctttacgcgcttcgataccgatggttttgattttggcccctttgttgccaatcaccatcttcttctgcccttcacgctcaaccagaatcagaccgttgatatcgtagccgccgcgctcgttggttacaaaacgttcgatctccacggtaacggaatacggcagttcagcgccgaggaaacgcatcagcttttcacgaatgatctcggaagccataaagcgctgagagcggtcggtgatgtaatcttccgggaagtgatgaatcgcttccggcagatgcttacgcacgataccggcgatggtatcaacgttcagccccgtttccgcggaaatcggcacgatatcaaggaagttcatctggctgccaaggaactgcaggtgcggcagaagatcggctttttcctgtacgttatcgactttgttgaccgccagaatcaccggcgctttaccatcgcgcagcttgttgagcaccatctcgtcgtccggcgtccagcgggtaccttcaacgacgaaaataaccagctcaacgtcgccaatggagctgcttgctgctttgttcatcagacggttaatcgcgcgtttttcttccatatgcaggccgggggtatcgacgtagattgcctgatacggaccttcagtatgaataccaacgatgcggtgacgcgtggtctgcgcttttcgggaagtgatcgagatcttctgcccgagcagcttgttcagcaatgtggatttgcccacgtttggacgaccaacgatggcaataaatccgcagtagttcttttcttcgctcattccagctccagctttttcagcgcctgttcggcggcagcctgctccgccttgcgacggctagaacccgtgccaaccaccggttcactcaggccgctaacctggcagtggatagtaaattcctgatcgtgcgcttcaccgcgaacctgtaccaccaggtaagacggcagcggcagatggcgcccctgcagatactcctgcaagcgcgtcttcggatctttttgcttgtcacccgggctgatttcatccagacgactctggtaccaggagagaataaggcgctcaacgttctgaatatcgctgtcgaggaaaatcccgccgattaacgcttcaacggtgtccgccagtatagattcacggcgaaagcccccgcttttcagttcacccggcccaagacgcagacattcacctaattcgaactcgcgggcgatttctgccagcgtgttgcctcgtaccagggtcgcgcgcatgcggctcatatcgccttcgtctacccgagggaaacgatgatagagcgcgttcgcgatcacaaagctcaatattgagtcgcctaaaaattccaggcgctcattgtgtttgctgctggcactgcggtgagttaatgcctgttgcaacagctcctgatgatgaaaagtgtagcccagcttccgttgaagccgattaattacgatggggttcatgcgttaccaatagatgaatgcgtcaaaaatgcagcacacgaaaccgacctgagtaaaaaccaacgcggtttcgtgtgctgtgtcaatcttacgagagacaacctaaaacttcggggggatattctatacgcaacgacaagggatgtcgttagtttgaatagatttaaattttaaataattcacgctgccgttattgcgtcggcagcgtgaataaagcaggaaagatttactggataccaccgatacgcgataaacgtacgccggtaggccattcgccttcctgtttttcgaaactcatccagattgcggttgctttacccaccagattcgcttccggcacaaagccccaataacggctatcggcgctgttatcgcggttgtcacccatcataaaatactgccccggcgggacaatccaggtcgccagcggcagaccggactgatggtaatacatccccacctggtcctgagcaatcggtacggtcaatatacggtgcgtcacttcgcccagcgtctctttacgttcggccagacggatgccatcggctttcgtctcgcctttcggcagttgccagaaaccgctggtcgcttcgccgccgttgctgcgggagaaggtctgtacgaaatcgctcggctcaacgttggagtaagtgaccggcagcgcgttgccgcaggcctggccagaactacagcccggctggatagtgacctgcttggcaatcggatcgtaagtcactttatcacccggtaaaccgaccgcacgcttgatataatccaggcgcggatcttgcggatatttaaagacgacaatatcgccgcgcttcggatgtccggtttcgatcagcgtcttctggtaaatcggatctttaatgccgtaggcaaacttctcaaccagaataaaatcgccgatcagcagcgtcggcatcatcgagccggaggggatctggaagggctcataaatgaatgagcgaaccaccagcacaatcgccagtaccggaaagattgacgcgccggtttccagccagcccggtttcgggccgacctttttcagcgttttcttgtccaactggtcgccggtcgccgcctgcgcagcggcctgactttcgcgacgttttggcgcaaagataaacttatccaggcaccacaacagacccgtcaccacagtagcgatgaccaggatcagggcaaacatgttcgccatgccaactccttagggttatttgccgtctttaccaacgtgcagaatggcgaggaacgcttcctgcggaagctcaacgttaccgacctgcttcatgcgtttcttaccgtctttctgcttctgcagcagctttttcttacggctgacgtcgccgccatagcatttcgccaggacgtttttacgcagctgttttacggtagagcgggcaatgatgtggttgccgatggcagcctggatagcgatatcgaactgctgacgcgggatcagctctttcatcttctctaccagttcgcggccgcggtatggcgcattgtcgttatgcgtgatcagcgccagcgcatccacacgctcgccgttaatcaacacatccacacgcaccatgttggaagcctggaagcgcttgaagttgtagtccagcgacgcatagccgcgggaggtagacttcagtcggtcgaagaagtcgagcaccacttccgccatcgggatttcataggtcagcgcaacctgattgccgtggtaaaccatgttggtctgtacgccgcgcttttcgatacacagggtgatgacgttgcccaaaaactcctgcggcagcagcatgtgacactccgcgatcggctcgcgcagctcctgaatattgttcagcggcggcagcttcgacgggctgtcgacgtagataacctctttcgaggtggtttcgacttcatagactaccgtcggcgccgtggtgatcagatccagatcgtattcacgctccaggcgctcctggatgatctccatatgcagaagacccaggaagccgcagcggaaaccgaagcccagcgccgtagagctttccggttcatagaacagagaagcatcgttgaggctcagtttgcccagtgcgtcgcggaagttttcataatcatcggagctgaccgggaacaggccggcatagacctgcggtttcacctttttaaagccgggcagcgctttatctgccgggttgcgcgcaagcgtcagcgtatcgccgaccggcgcgccaaggatgtctttaatggcgcaaaccagccagcctacctcgccgcatttcagctcggtacggtccacctgcttcggcgtgaagatgcccaggcgatcggcgttatacacctgcccggtactcatcaccttaattttatcgcctttgcgcatggtaccgtttttgatacgcaccagagaaacgacgccgaggtagttatcaaaccaggagtcgataatcagagcctgcagcggcgcttccggatcgccttccggcggcggaatatcgcgcaccaggcgctccagcacgtccggtacgccaacgccggtcttcgctgaacagcgcaccgcatcggtggcatcaataccaacgatgtcttcaatctcttccgctacgcgttccggatcggctgcgggcaggtcaattttgttcaggaccggtacgacttcaaggtccatttccatcgccgtatagcagttagccagcgtctgggcttcgacgccctggccggcatcaaccaccagcaaagcgccttcacaggcggcaagcgaacgagaaacttcataagagaagtcgacgtggccgggggtgtcgataaagttcagctgataggtttcgccatcagttgctttgtaatccagggtgacgctctgcgccttgatagtgataccgcgctcacgttcaagatccatggagtccagaacctgggctgccatttcacgatcggaaaggccaccgcaaatctggataatacggtcagacaatgtcgacttaccgtggtcgatgtgagcgatgattgaaaagttacgtatattcttcatatttagagttaattatgccttacgcgaatcatgaggccgctgttctgtgcctgacgttttttaatccgaaaacgccgcattctacactacatccacgaaaccaggaaatgctcttaccgctagcataaccggagtaaatgatgagttcctgcgggagttgtaaataaagataagggccagtgaaatcactgacccagttgggaggaaggcgtctcgatgcggactaaatctggcggtaaaccgacgctgataataaccggctgccacgactgccgggaggctaagccaggcgaaagaccgcgagcgaccagaaacccgccaacgccgcccaaaatggccccgcaaagcgaggcaaagtcgttggcaaacagcacctggaatattgatgccatcacaaacaaaccgactaacggcgccatataaaccaataccgccgacccgagcaggctgctttcggcaatgcccagttcgactttttgcccggccgacagcggctgttcgcaggggacgctaagggtatggctggtttgcggcccaagcttattcagcacccggcttccgcaaccggcgcgagaagcacagctgctgcaggaggctttcacatcgcagtgcaccagcgcaacgccattttgccaggaaacgaccgtcgcccactctttaatcattgtactgccctgaatttaatactatcggaaatacgcttcgccgtttgcggcggcagctcgccaacgatggttatctctgcgttatcacgcacggtagtcgccacggtacgacggccggtacgcagcagctgatcgctgctatttgccgtggcgcgattgatattgacagagaaactaaacagcccgtcggaatacaaacgggactctaccgggccatcgaaagtgggcagacgacgctggctgctggagacttcggccacgccctgcggcagccaggttggcgcccagttaaagttggccttatttcccccttccggcaccgacagctgcggaggcaggttggccttagacagggtttccatactggcgctaacgttatcgccaacgttgaacgagacgacgcggaactgctcaagcgtttcgccgtcgcgatcaagcagatcaacgcgcagaggcagcttagtttcagcatctaaccatgcgatatagctatagcgggtgccatcgcgagccacgacgcgcacaacatcgcataaacgatcggcaatacgcgtccgccccacggaaatgaagtcgtaataggatgacagacgtttaaagtcggagtagaccaatgaaggcagcgaatcaacgatatagtcgccgttcagggtgaaaggatcgagtccgggctcaaaatagctgatttccgttccgcgcagcaccacctcccgacgcggcccgtcaagctggagcagctgtgccagggtgcgattgtttagtttagcgtgtcgataacgcagcgactcaacaccctgcttgttgatgctgacgaaagagagctcgtaattaagggactggctggccaggttcatctgctgcaacaacgccccggacgatgtatcagccgaggcgttgacggagaagaacaggctgcctgccatgagcgacatggcacaccaaagttgcttcattactgcgattgtgttcctaaagtttgatagcccggcacctgaacagcggcttgctgagtctgggcctggccaaactgaagctgttccgcatgcaggcgacgctgcaattcatagtcctgcagcatagcattaattctgcggcgctgttcctgcacctgagcctgctgaccgctacctgccgaagcatccgccggcacgcccaggctgaccgggctggccttacccatcatcggcatggtgttaaacaccggcgcctctggctgctgggatgaatcagactggccattatactgctgaacgccgacaatcacagcaagggatacgcacgcggcaacgcccatctgggtaagcgagctggcccacgggcgtactttttgccagaaaggcatctgacgccactggtgcggtgcgggctgagattcaggaattagaggaaccgtctgacgaacgggctcgttttcaatggcggccatgacgcgagctgagatatcaaaatggagcacctcactcgtatcgcctcgcagcgtatcgcggatgagatggtagctctcccaggttttttgcatttcagatgaacgctccagctcgttgagcagttcgttatccagcgtttcaccatccattaaggccgaaagtttttctttctgcatgcctgatacccttttccagtattccgctatcgtcaacgcctgattagcggttgaactttattatcaatagcttctcgcgcccggaagatgcgcgaacgcactgtgcccaccggacaatccatgatggcggctatttcttcatagctcatgccatccagctcccgcaaggtaattgccatgcgtaaatcttccggaagcgattcaatggtacgaaaaactatttgtctcagctcttctgacaacattaagttctcagggttcgaaatttctttcaatgccccgccactttcgaagttttcagcatcattcgcatcaacatcgctggatggcggacggcgtccctgagcaaccagataattcttcgccgtgtttacggcgatgcgatataaccaggtgtaaaaagcgctatccccccggaaagaatccagcgcacgccatgctttaacgaacgattcctgaacaacgtcagcgatatcgcccggcggcacgtagcgggagaccagacttgcaaccttatgctgatagcgcaccaccagcaggttaaatgctttctgatctcctttctggacccgttcaacgaggacctgatccgttaactgctcgctcatccgaggtaatgtctccccaaacccaattcccatgcgtattcaaaaacaccacccaattactgcatcaagtgagcaagcagagggttggagtgtctgaaaacaataaagttccgttacgcctttgtttttcgtccggcaccggctgacggattgttatctctcattatatgtcccggtcgctaaacgatatgtaagataataagaaaaagcgcaagacccgccagaagggtaacgtaacccggcttttatttcactataaaatctgaagctcacgagccgcttcgcaaaaccttttttccatttacagcccgcctcattacgccgttatgtttagtcctcacaacgcggagtaaaaaaaatgtacgatttctcgctggctggtgctattgttcgcttattgtgtttagtaaattaaacaaaggccatgaaaacaacttccgattcctcctgtgatgtgctgattattggcagcggcgctgccggattatcccttgccttacgcctggcggaacgctgcgcggtcacggttctcagcaaaggccctatcagtgaaggttctactttctacgctcagggcggtattgccgccgtatttgatgaaaccgatagcgttgaatcgcacatcgaggatacgttgatagccggagcgggtctttgcgatcgccatgcggtctcattcgtggcgagcaacgctaaaccctgcgttcagtggctaatcgatcagggcgtgctgtttgatactcaggttcaggcgaacggcgaagagagctaccatctgacccgcgagggaggtcacagccaccgcagaattctccacgccgccgatgcgaccggtaaagccgttgagactaccctggtgagccaggcgctggcccaccctaatatccgcatactggaacgcagtaacgccgttgaccttattatctccgataaaatcggcctgcccggcacgcgccgggtggtgggcgcgtggatctggaatcgtaataaagaagcggttgaaacctgtagcgcaaaggccgtggtgctggctaccggcggcgcggctaaagtttatcaatatacgacgaatcctgacgtctcttccggcgatggtatcgcgatggcctggcgtgccggctgccgggtcgccaacctcgaatttaatcagttccacccaaccgcgctgtaccatccgcaagcgcgcaacttcctgctgacggaagcgctgcgcggcgagggcgcgctgttgaaacgccctgacggcacgcggtttatgccggactttgacgagcgcggcgagctggctccgcgcgatatcgtcgccagagccatcgatcatgagatgaagcgccttggcgctgactgcatgtatctggatatcagccataaaccggcagaatttattcgccaccacttcccgatgatctacgagaagctgctggggctgggcatcgatctgacaaaagaagcggtgcccgtggttcctgccgcacactacacctgcggcggcgtcatggttgacgatcacgggcgcaccgacgtcgacgggctgtatgccatcggtgaagtaagctataccggattacacggcgctaaccggatggcatcaaactcgttgcttgagtgcctcgtctacgggtggtccgccgccgaagatatcgttaagcgtctgccgttcgcgcaggcagtcaatgaactgccatcatgggacgaaagccaggttgaaatacctgatgaactggtcgtgattcagcacaactggcatgagctgcgcttgctgatgtgggattatgtcggcatcgtgcgcaccacccgccgtcttgagcgcgccctgcgccgcattactatgctgcagcaggagctggacgaatactacgcccgcttccgcgtctccaataatttactggagctgcggaacctggtgcaggttgccgagctgattgtgcgctgcgccatgctgcgtaaagagagccgcgggcttcactacacgctggactatcctgaccagttgccggagagcgggccgtcggtgctctcgccgttggctcacataaaaagataaaagtcctgggtcagagcggtaaatccttcggaatactgctgctctggcccacggatgatcaatctgtcgctaaagcactcctcccccgccgtcggcgaaaaagccaacagaacccgatgcggcgggcgcacttccgtttccgccacgtcggtacgcagacgcagatgccagcccatattctgcgcccgctgcacaaaggcgttaccaatgtcgaccggaagcacgacgcagaaaaacccctcctccgtaataagctcggcggcgcaggttaataatgttgcgtgatcgagggaggaggtatagcgagcctgctcgcgctgcgaggtggcgcaaggtacgccttcagcgaaaaaaggcggattgctgacaatcagctcatagcggcgggtttgctgcggctgccattgctgaatatccgcctgatgaatctgcaggcgatcggcccagggagaatccgcggcgttttctcgcgcctgttctgccgcctcttcatccagctccacggcatccacaatcaccgtctcgccggttcgctgcgcgagcatcagcgctaacagaccgctgcccgcgccgatatccagcacgcgcttaacctgagcgatgggggcccatgcgccgagtaaaatgccgtcggtacccactttcatcgcacagcgatcgtgggcgacaaaaaactgcttaaacgtaaaaccattgcgcggcagcgcgaacttcgactgggacatcctcgataaccttgcgggcaaaaaactcctgagcttaaggctatgcacaataccggagaacagatagccttacaaacagatgaacattgcgtccgtaacgtctataatcggcggtccactcagaggtagatcatgactgtaacgactttttccgaacttgaactcgacgaaaacctgctggacgccctccaggataaaggtttcacacgcccgacagccattcaggccgccgctattccgcctgcgcttgatggccgtgatattctcggttcagccccgaccggcaccggtaaaacggcggcgtatctcctgccagcgttgcagcatctgctcgattttccgcgcaagaagtctggtccgccgcgcattcttatcctgacccccacgcgcgaactggcgatgcaggttgccgaccatgcgcgtgagctggcaaaacatactcatctggatatcgccacgatcaccggcggtgtcgcctatatgaaccatgccgaagtgttcagcgagaaccaggacatcgtggtcgccacgaccggtcgcctgctgcaatatattaaagaagaaaactttgattgccgcgccgttgaaacgctgatccttgatgaagcggaccgcatgctggacatgggcttcgcgcaggatatcgaacacattgccggtgaaacccgctggcgtaagcagaccatgctgttctccgccaccctcgaaggtgacgccattaaagattttgctgagcgtctgctggaagaaccggtggaagtctctgcgactccctccacccgcgagcgtaaaaagattcaccagtggtattaccgcgccgatgacgtcaagcataagaccgcgctgctggtccatctgctaaagcagccggaagcgacgcgttctatcgtcttcgtccgtaagcgcgagcgcgtgcatgagctggcgggctggctgcgtgaagcgggtatcaacacctgctggctggaaggcgagatggtacaggcaaaacgtaatgaagcgattagccgcctgaccgatggccgtattaacgtgttaatcgccaccgacgttgccgcgcgcgggatcgacatcgcggacgtcagtcacgttttcaacttcgacttgccgcgcacggccgacatctatctgcaccgtatcggtcgtaccggacgcgcgggtaaaaagggaacggccatctctctggtcgaagcccacgaccatctgctgctgggtaaaattggccgctatattgaagagccgttaaaagcccgcgtcatcgatgaactgcgcccgaccactcgcgcacccagcgagaagcaaaccggtaaaccttccaagaaggttttagccaagcgtgcagagaagaaagagaaagaaaaagagaaaccgcgcgtgaaaaaaacgccatcgcgataccaaaaacattggtaagcgtcgtaaaccaagcgcagcggatgctccgcagaagtcaaacgaagagtaaaaaaaacgccgggatatcccggcgttttcacattaaaacggaatcttacaggctttcagtaaaagtacgggcgataacgtcgcgctgctgttccggagtcagagagttaaagcgtaccgcatagccagacacgcgaatggtcagctgcgggtatttttccggatgttcaaccgcgtccagcagagtttcgcgacgcagcacgttaacgttcaggtgctgaccgccttcaacgcggacttcaggcttcacgtctaccgggatttcacggtattcgatttcacccagattgctcactgcaaccacgtcatcttcagcaaaaccggctttcgcgcacaggcagcgggcttcgcctttttcgctatccagcagccagaaagagttcagcaggtcgtcgtttgcagctttagtaatttggataccagtaatcattttatgcctcccaggcagggtttgttcgattattggccttcgcggccaattggtaaaaccattgttctatgagtgtatatatatcagccgtacacccggcattctttgatttaaatcaacaaaaaccacatcacaaaagtggtcataggcggatattattgttttacatcaagttacgccatgccacctaccaaataaatttgtaagttttcaattttttttgcataaagagcgtcaatcgcgtggggcaaattttgtgatgttgaaagatgcagttaagctatggcaatgacactttgcaggagagcaaaatgaccgccccattaacctggcatgacgtgctggcagaagagaagcagcaaccctattttgttaataccctgaaaaccgttgctgacgagcggcaatcgggaatcaccatctatcccccgcaaaaagatgtctttaacgcgtttcgttatactgagctaagcgacgttaaagtggtgattctcggccaggatccttaccatggaccagggcaggcgcacggcctcgccttctcggttctaccgggcattcagatcccgccatcgctgctgaatatgtacaaggaactggaagggacgataccaggctttcagcgcccgactcacggttatctcgaaagctgggcgcgccagggcgtgttgctgctcaataccgtattaacggtacgtgccggacaagcgcactctcacgccagcctcggttgggaaacttttaccgataaagtcatttcgctgattaaccagcatcgggaaggcgtcgtctttctgctgtggggttcgcatgcgcagaagaaaggcgcgataatcgatcgccagcgccactgcgtgctcaaagcgccgcacccgtcgcccctctccgcccaccgcgggttctttggcagtaatcatttcgtgcaggcgaatcagtggctgaccgaacgcggcgaagcgcccattgactggctgcccaggctaccggctgaaagcgaatagctctgaaaatgaaaatgccagcattacgctggcattttgactctgagacaaggtgttacgccttgttctgccgccaccattcagccagcagcacgccggttgctacggacacgttcaggctttcaacgttgccggtgccttcaatcgcgatgttcagatcggcgctggagatagcggcgtcagaaagaccgtcactctcctgccctaacaccagcaccattttcttcggcagctcggctttgaacagcggagtcccgttatggctggaagtagaaacaatcgcgtagcccgctttacggaagcgctcgagcgtatcgatgaagctgtcgcccgtaatcggctcaacgtgctccgcgccgccttccgcagtacgaatcgcggcgccggactccataacgccggcatcctgcacaatcacgcctttgacgccaaagtgcgcacagctgcgcataatcgcgccgaggttatgcgggttgccgacatcttccagcgccagaacacaatcttcagcgtcggatttagccacccactgctcaacggaagtgccgtggcgctttttaatcaggaagcaaaccccgccgtggtgttcagtgccggacgctttcgccagctctgcttcatcgaccacgtgataggctttacgattcgccgccatccagcgtagagcttctttgaagcgcggggtcacgctctggataaaccaggcgcgaacgatagcgtccggacggctctggaacagcgcctggcaggcgttttcaccataaacgcgggtttcttccgcgcgctggcggcgcagtacttcaggatcgataaagctttttccgctgatcccgccgtgatccgcttttaccggcgcctcatcgcccggcgcgcgggatacggtacgccacggagaggagccctcgccgccaaagccttcacgcttgcgatcgtcacgtctacgatcgccaccgcggctctctttttcatcgcgcgcagggcggttacgaccgtcaacacgagactttcctggacgtcccccgcccttcccggtacgcgggttatgggtacgtcggtcagaatcatcatcactgcggacatacatcactttgaccttgccgcttttatttttcagttcgtcgtcgctcattcattttctccacctgcgctgcgcgaagcgcgcagattacccgatgtgccatcacttagccattatttcatttaaaagcctgagtctatcgtattcattgaataaaactcattgtcctttattcgcagtgcatcgataatatgtaacattacagaaacaaatcggccacgtgccgcgctgcaacccataaccagaggttagttatgaataccgtttgtgccagttgtcaggctctgaaccgcatccccgacgatcgtagcgccgatggcgcgaaatgcgggcgctgcggtcacgatctttttgatggcgatgtgatcaacgcgaccggggtaacgctggataaactgctgaaggacgatctgcccgtggttgttgatttctgggcgccgtggtgtggcccctgccgtaactttgcgccaatctttgaagatgtggctgaagaacgcagcggcgaaatgcgtttcgtgaaagtgaataccgaaatggagcgtgaactgagcgctcgcttccgcattcgcagcatcccgaccattatgatgtttaaaaatggcgaagttatcgacatgctcaatggcgccgtacctaaagcacctttcgatagctggctaaacgaagcaggccagcagtaaacctcacggggcaccgcttgtgccccgttttctcctctgcgacaatggcgttttttcttagcgatccccatgactgataacgccgtccttcgccttcgcgccgaacgcctcgcgcgcgccacccggccttttcttgctcgcggcaaccgtatccaccgctgccagcgttgcttgctgccgttgaagcagtgcctttgcgccaccctcaagccggctgccgccgccagccgtttttgcctggtgatgttcgataccgagccaatgaagcccagcaataccggccgcctgattgccgatatcctgccggatacggaggcctttcagtggtcacgaaccgaaccgccgcaggcgcttctcgatctcgtcgccgacgcgcaatatcagccgatagtggtttttcctgcctcttatgctggcccagagcgtcaggttcttgattccccgctcccgggtaaaccaccgctgtttatcatgctcgacggcacctggcccgaagcgcgaaaaatgttccgcaaaagcccctggcttgacgcgctgccgatgatttccgtcgatctgtcgcgtatctccgcttatcacctgcgggaagctcacgcagaaggccaatactgtactgccgaagtcgcgattgcgctgctggatctcgcgggagataaaagcgcagccacggcccttggcgagcacttcagcttattcagaacgcgctacctggcaggaaaaactcagcataagggtagtatcacagcacaactgacagaaaacgtttaaaatcattcggtcactggggatcaaaggagaccggtatgagccaacgaggcctggaagcattgctgcggccaaagtcgatcgccgttattggcgcatcaatgaaaccacagcgcgccggttatctgatgatgcgcaacctgctggcgggcggatttagcggccccgttctccccgtaacgccagcgtggaaagcggttcagggcgtactggcctggcctgacgtcgacagtctgcccttcacgcccgatctcgccgtgctttgtactaacgcccgccgaaatcttgagctgctggaagcgctggggcaaaaagggtgcaaaacctgcatcattctctcctccatccccgaacagtatcccgcgctgcttgaatgcgcctcccgctaccagatgcgtctgctcggccctaacagccttggcctgcttgcgccgtggcagggcctcaacgccagcttttcgccggtgcctattcatcgcggcaaactggcgtttatttcgcaatcggcggcggtctccaataccatcctcgactgggcccagcagcgcgagatgggtttttcttactttattgcgctgggggatagtctggacatcgacgttgatgacctgcttgatttcctcgctcgcgatagtaaaaccagcgccattttgctttatctcgaacacctcagcgatgcccgtcgttttgtctcagcggcccgtagcgcatcgcgtaataagccgattctggtgattaaaagcggacgcagtccggctgcgcagaagcttctgcacgtcaactctggcatggatccggcctgggacgccgctattcagcgcgcaggtttattgcgcgtacaggacacgcacgagctgttctcagcggtcgaaaccctcagccacatgcgcccgctgcgcggcgagaaactgatgataatcagcaacggcgccgctccggctgcgctggcgctggatgagctctggctgcgtaacggcaaactcgccgcgctcagcgaagagaccagcagcgctctccgtcaggcattacctgaaaccatcgatatcgccaacccgctggatctccgcgatgacgccagcagcgagcattacctcaaagcgttgaacgtactgctggatagccatgactacgatgcgctgctggtgatccactctcccagcgctgccgcaccgggaacagagagcgcgctggcgttgattgacgccctgaagcgccacccgcgcggcaaatacgttacggttcttaccaactggtgcggtgagttctcttcacaagaagcccggcgcctgtttagcgatgcggggctgccgacctatcgaacgcctgaaggaaccattaccgcttttatgcacatggtggagtaccggcgtaaccagaaacagctcagggaaaccccggtcctgtcagattcgttaaccactaacgctgccgaagcgcacaacctgctgcaacgggcaatgaatgaaggcgcaacgtcgctggatacccatgaagtgagccccgttctgcacgcttacggtattcataccctgccgacgtggattgccgccgatagcgccgaggctgtacatattgccgagcagattggctaccccgtcgctctgaagctgcgctcgcctgatattccgcacaagtcggaagttcagggggttatgctttatctgcgcacggctacagaggtacagcaggccgcggacgcgattatcgatcgcgtcaaaatgacctggcctcaggcgcgtattcacgggctgctggtgcaaagcatggctaatcgcgccggggcgcaggagctgcgggttgtcgttgagcacgatccggtttttgggccgctgatcatgctgggagaaggcggcgtcgaatggcgggctgaggatcaggccgccgtcgcgctcccgccgctgaatatgaaccttgcgcgctatctggttatccaggccatcaaaagtaaaaaagtgcgcggccgcagcgcgctgcgccctctcgatattcctggcctgagccagcttctggtacaggtatcgaatctgatcgtcgactgtccggaaatacagcgcctggatattcaccctcttctggcttccggccacgagtttaccgcgcttgatgtcacgttaactctcgcaccgtttaccggcgatagtgaaagtcgcctggccatacgcccttaccctcagcagcaggaggagtgggtggtgatgaagaatggcgaacgctgtcttttccgtcccatcctcccggaagatgagccgcagcttatggcctttatcgctcaggtcacgaaagaagatctttattatcgttacttcagcgaaatcaacgaatttactcatgatgatttagccaatatgacgcagatcgactacgatcgagaaatggcctttgttgctgtgcgcaccaccgccgaggggaacgagatcctcggcgtaacgcgagcgatctccgatccggataatatcgatgccgagtttgctgtactggtgcgctccgacctgaagggtatggggttaggccgcaagctcctggaaaagctgattatctacacgcaaaaccacggcctgcagcgtttgaatggcattaccatgccgaataataaaggcatgatcggactcgccagaaagctaggattctcggttgatattcagcttgaagatggaattgtcagtttgtctctacagcttgtacctgagcaattacaaacggctggccgcaattgttgactactttaacgggtagtaatggtattattgcccgcttacgtcgtctgcatggtacagaagacccttcaataaacagagaagaaacgcactgtgatgttgtcaaaatttaaacgcaataaacatcaacaacaccttgcccaactccctaagctttctcagtcagttgatgatatcgagttcttttacgctccggcagattttcggcaagcgttactggccaggatagctcaagccacccagcgtatttgtatcattgcgctttatctggaacaggatgatggcggcaaaggaattttgcaggcgctctatgacgctaagcgtcagcgtcccgaattagatgttcaggtgttggtcgactggcatcgcgcccagcgcgggcgtattggcgtcgcggcgtcaaacaccaatgccgactggtactgccgcatggcgcaggaaaatcccggtgtcgatatcccggtttatggcgttccggtcaatacccgggaagcgctcggcgtcctccacttcaaaggttttatcattgatgacagcgttctctacagcggcgccagtctgaatgatgtttacctgcatcaacacgataagtatcgctacgaccgctaccagtgcattcgcaacggtaaaatggctgatgtgatgttcgactgggttgagaataacctggtgcaagggcgtggcgttaaccgccttgacagggccgatcggccaaaaagtccggaaatcaaaaatgacatccgccagtatcgccaggagctccgcgatagcagctatcattttatcggcaatgctgacgatgaccagctgtcggtcactccgttagtgggcctcgggaagacgagtctgctgaataaaaccatttttcatttgatgccctgcgctgagcataagctgactatctgcaccccctatttcaacctgcccgctctgctggtacgtaatatcatccagctgctgcgtagcgggaagaaagtcgaaattatcgttggtgataaaaccgctaatgatttctatattccggaagatcagccgtttaaaattatcggagcgctgccctatctttacgaaatcaatctgcgacgcttcctgagccgactgcagtattatgtcaataccgatcagctgattgtccgtttatggaaggacgacgataacagctaccacctgaaaggcatgtgggttgatgacgaatggatgctgctgaccggcaataacctgaacccgcgcgcatggcggctggatttggaaaacgcgatacttatccacgatccaaaacaccagctcggcgcaatgcgtgaaaaagagctcaatctcatccgcaaacatactacgatcgttcagcactatcgcgatctacaaagtattgccgattacccgataaaggtacgcaaactgatcaggcgtctgcgacgtatccgaatcgaccgccttatcagccgtattctctgaattcacgccccgccctgcggggctttttctggaattagtatgcgcgtcatcatgcttattgccccactattattactgactggctgcagccatatggctaatgattcatggagcggccaggataaagcccaacacttcctcgcctcagccatgctttccgccgcaggcaacgaatatgcccagcatcagggctatagccgcgaccggagtgccgctataggctttatgttttccgtgagcttaggggcatcgaaggagctatgggacagccgcccgtcagggagcggctggagctggaaagattttgcctgggatgtggcaggtgccactaccggctatgcggtatggcagctggcacatcagtaatgctacaaacgtagccccttgcctttacgatgcagcgtcagggagaccaggaaggcaatcgcgcccatgacggtcacgtaccagtaaaaggcgtgctcaattcccgctgattttagcgacagcgcgacatactctgccgagccgccaaatagcgcattggccaccgcataagagagtccaacccccagggcacgaacctgagccggaaacatttcggccttcagaatgccgctgattgaggtatagaagcttactatcaacagggcgcatatcactaaagcaaatgccgcatacggtgaactcacgttctgtaatgcattgagaatcgggacagtgaagacggtgacgagtacgccaaaacagagcattgaggtccggcggccaatcttatccgaaagcgcgccgaaaagcggctgaacaagcatataaacaaataaggcagcggtcataatcatgctggcggtacccgcgctcatgcctgcggtgttgaccagatatttctgcatataggttgtaaaggtataaaagcttaacgaccctgcggcagtgaatccgagcaccatgataaatgccttacggttacgccataatcctttaaacgatcccgcttcttttaacgcgcgcgtttcctgttgagacgtttcgtccagctgtcgtctcagccacagggcaacaatagccaggactgcgccaagagcaaacgggatacgccatccccaggcatgaagctcttcatcgctgaggatctgctgcaaggcaaccacaacaagcacggccagaagttgcccaccaatcagcgtgacgtattgaaatgaggcatagaaacctttctttccttccaccgcgacttcgctcatataggtcgcgctggtaccgtattctccgccaacggacaggccctggaacaggcgtgcaagtagcagcagagccggggcccaggtccctatcgttgcataacccggcaggcaggcaatcaccagtgaaccaaaacacatcatgcatacggagataagcatagaggttttacgtccacgacgatcggcaatgcgcccgaatatccatcccccgatcggacgcatcagaaaacccgccgcaaatacccctgcagtttgtaacaattgcgtagtggtgttgccagaaggaaagaagatgtgcgcaaagtagagtgagcaaaatgaatagacgtagaaatcaaaccattccaccaaattccctgatgacgcccccacaattgcccatatacggcgccgggtatcaccctgatcctgggatccgcgttcgctaatactgctttctgtcattgtaattctgctccagcaaagactgcaatctgccgcgtcgggtgaccccgctcaatcagacaaatcgattagtaaattaaatgttatataattgttattttttagtttgtgatgccattcacattttttttcgtactgcaggttttcgcgattaaaaggagattcttcaggattagcaaagtgaaatatggtgaatagcgggccagaacaggtttttatacaggcgatattgcggcacaaatttatgtggggcgggaagatcgatgctgaaaattatccccaatgagcctgatgtttcttttttcgctggagataatcttcatcctgacgaagcttatcccaccattgtttgaaaactgccgcagctgccgccttaacaggatcattacctcgcgaattcaggtgcccctccttcgcgtattttttaccgcctttgtaattggcataacgccttgcccgggtgtagcccatctgaataaatttgcgcgccatatccataccgacaaaatcattctgctgtcgatagaactcgaagagctgataaattttcctcgcagattcaatcgccgatgcttcatctttatagcgccagtagggaagaatttcgcttttatagggttcaaccaacaacacgccctgttcacctcttcctacctgataaaactccggatgctggcgaaaatcgatgctggaaaagtcttgctggtaattaaaaggcttaatggccattattttctcacgggctggctgatacacgttataagcctggtacataagactgaagtgtggctagtggaatcttctgtatatttatacagagagcccgcataaaaccggcaggttattatt
